(19) United States
(12) Patent Application Publication
(10) Pub. No.: US 2022/0145339 A1
(43) Pub. Date: May 12, 2022

(54) METHOD FOR PREPARATION OF PRIMARY AMINE COMPOUNDS

(71) Applicant: Max-Planck-Gesellschaft zur Förderung der Wissenschaften e.V., Munich (DE)

(72) Inventors: Lennart Schada Von Borzyskowski, Marburg (DE); Tobias Jürgen Erb, Marburg (DE)

(21) Appl. No.: 17/296,559

(22) PCT Filed: Dec. 9, 2019
(86) PCT No.: PCT/EP2019/084291

§ 371 Date: May 25, 2021

(30) Foreign Application Priority Data
Dec. 10, 2018 (EP) 18211454.6

(51) Int. Cl. C12P 13/00

(52) U.S. Cl. CPC C12P 13/001

(57) ABSTRACT

The present invention relates to an enzyme-catalyzed enantioselective method for preparing primary amines from the corresponding imines by using imine reductase enzymes.

### FIELD OF THE INVENTION

[0001] The present invention relates to an enzyme-catalyzed enantioselective method for preparing primary amines from the corresponding imines by using imine reductase enzymes.

### BACKGROUND OF THE INVENTION

[0002] Chiral amines are valuable building blocks in the pharmaceutical, fine chemical and agricultural industries and are also used in chemical synthesis as chiral auxiliaries or resolving agents for diastereometric salt crystallization. One of the most important reactions for the preparation of chiral amines is the asymmetric reductive amination, wherein the C═N bond is formed in situ by condensation of a carbonyl compound with an amine compound and subsequent asymmetric reduction of the imine intermediate (Lenz et al. World J. Microbiol. Biotechnol. 2017, 33, 199). Chinese patent application no. CN 107935970 A discloses the preparation of 3-methylamino tetrahydrofuran, from tetrahydrofuran-3-carboxaldehyde by reductive amination using a palladium or Raney-Ni catalyst.

[0003] In recent years, biocatalysts, particularly imine reductases (IReds) and reductive aminases capable of reducing imines to chiral amines were discovered and structurally characterized. The European patent EP2847214B1 reports on an engineered opine dehydrogenase from Arthrobacter sp. which converts ketones and amines to secondary and tertiary amines under industrially applicable conditions. The reductive amination of cyclohexanone or hydrocinnamic aldehyde with primary alkyl amines by enzymes derived from Amycolatopsis orientalis and Aspergillus oryzae was described by Aleku et al. (ACS Catal. 2016, 6, 3880; Nat. Chem 2017, 9, 961). Huber et al. report on a NADPH-dependent (S)-selective IRed from Streptomyces for the direct reductive amination of ketones (ChemCatChem 2014, 6, 2252) and Hussain et al. describe an IRed for the asymmetric reduction of cyclic imines (ChemCatChem 2015, 7, 579). Wetzl et al. describe imine reductases identified by C-terminal domain clustering of the bacterial protein-sequence space. The enzymes were tested in a model reduction of cyclic imines to pyrrolidines, piperidines, tetrahydroisoquinolines and tetrahydrobenzindoles (ChemBioChem 2015, 16, 1749). However, the known imine reductases were only successful in the synthesis of secondary and tertiary amines. So far, no imine reductase is known in the prior art that catalyzes the reduction of imines to primary amines.

[0004] The imine reductases of the prior art possess a high cofactor specificity towards NADPH (nicotinamide adenine dinucleotide phosphate) compared to NADH. However, the concentration of the cofactor NADH in a cell is an order of magnitude higher, NADH is about an order of magnitude less expensive and NADH is more stable than NADPH (J. Biol. Chem. 1971, 246, 1107). Moreover, commonly applied cofactor regeneration systems for NADPH in whole cells are not sufficient on a larger scale (Curr. Opin. Biotechnol. 2003, 14, 421). Therefore, imine reductases having a high specificity for NADH as cofactor are highly desirable for use in in vivo or in vitro reduction of imines on an industrial scale.

[0005] It is the objective of the present invention to provide enzyme-catalyzed methods for the preparation of primary amines from the corresponding imines.

[0006] The objective of the present invention is solved by the teaching of the independent claims. Further advantageous features, aspects and details of the invention are evident from the dependent claims, the description, the figures, and the examples of the present application.

### DESCRIPTION OF THE INVENTION

[0007] The present invention is directed to a method of preparing a primary amine compound of general formula (IB)

[chemical structure]

wherein R¹ and R² are independently selected from a hydrogen atom, and optionally substituted alkyl, alkenyl, alkynyl, alkoxy, carboxy, aminocarbonyl, thiocarbonyl, heteroalkyl, heteroalkenyl, heteroalkynyl, carboxyalkyl, aminoalkyl, haloalkyl, alkylthioalkyl, cycloalkyl, aryl, arylalkyl, heterocycloalkyl, heteroaryl, and heteroarylalkyl; and optionally R¹ and R² are linked to form a 3-membered to 10-membered ring;
comprising:
[0008] A1) Providing an imine compound of general formula (IIA)

[chemical structure]

[0009] wherein R¹ and R² have the meanings as defined for formula (IB); and
[0010] B1) Reacting imine compound of general formula (IIA) with a polypeptide having the enzymatic activity of an imine reductase in the presence of a cofactor, to afford primary amine of general formula (IB),
   wherein the polypeptide comprises the conserved amino acid sequence as set forth in SEQ ID NO: 610.

[0011] The method of the present invention relates to the use of an enzyme forming part of the β-hydroxyaspartate pathway (BHAP), which was elucidated by the inventors in proteobacteria, such as in Paracoccus denitrificans.

[0012] As shown in FIG. 1, in the BHAP, the enzyme β-hydroxyaspartate aldolase (2) catalyzes the condensation of glycine and glyoxylate to (2R,3S)-β-hydroxyaspartate and the enzyme β-hydroxyaspartate dehydratase (3) catalyzes the subsequent dehydration to iminosuccinate. The iminosuccinate is reduced to aspartate by the iminosuccinate reductase (4) in the presence of the cofactor NADH and the formed aspartate is finally converted with glyoxylate to oxaloacetate in the presence of aspartate-glyoxylate aminotransferase (1).

[0013] Based on the sequence of a putative β-hydroxyaspartate aldolase gene (dhaa; GenBank Accession No. AB075600) from Paracoccus denitrificans IFO 1330123, the inventors have identified a homolog in the genome of P. denitrificans DSM413 (BLT64_RS06500), which is part of a gene cluster, consisting of four structural genes and a putative transcriptional regulator. Besides the BHA aldolase (Pden_3919; GenBank: ABL71985, annotated as alanine racemase), the operon comprises ORFs annotated as coding for serine-glyoxylate aminotransferase (Pden_3921, GenBank: ABL71987), serine/threonine dehydratase (Pden_3920, GenBank: ABL71986) and ornithine cyclodeaminase (Pden_3918, GenBank: ABL71984). The putative transcriptional regulator (Pden_3922; annotated as IcIR-family regulator) is in opposite orientation to the four structural genes of the presumed BHAP operon. To verify that these genes indeed encode for the enzymes of the BHAP, the ORFs were cloned and separately overexpressed in Escherichia coli BL21. The purified enzymes were tested in spectrophotometric assays to elucidate their function and confirm their role in the BHAP. The inventors could confirm that Pden_3919 encodes for the key enzyme of the BHAP, BHA aldolase, which catalyzes the condensation of glyoxylate and glycine into ß-hydroxyaspartate. Furthermore, while Pden_3921 is correctly annotated as a PLP-dependent aminotransferase, the inventors could show that its preferred substrates are aspartate and glyoxylate, which are converted into oxaloacetate and glycine, therefore this enzyme has been here named as aspartate-glyoxylate aminotransferase. The function of Pden_3920 as BHA dehydratase, which had previously been purified from cell-free extracts of P. denitrificans (Gibbs and Morris 1965), could be confirmed. Moreover the inventors could show that Pden_3918 encodes for a polypeptide having enzymatic activity of an iminosuccinate reductase (and not ornithine cyclodeaminase as putatively denoted in UniProt database accession no. A1B8Z0), which reduces iminosuccinate to L-aspartate, thereby regenerating the amino group donor in the first step of the BHAP. The inventors could further show by phylogenetic analysis that the BHAP is widespread in α- and γ-proteobacteria, in terrestrial as well as marine habitats.

[0014] The conserved amino acid sequence of SEQ ID NO: 610 reflects the conserved sites of the homologous imine reductase enzymes identified by the inventors (SEQ ID Nos.: 300-598) as shown in Table 1 below. The conserved sequence—in its common meaning in the art—is determined from the multiple sequence alignment of the imine reductase sequences, wherein the sites conserved throughout all aligned sequences are listed in Table 1. As the aligned imine reductase sequences may contain gap(s) or deletion(s), the conserved sequence determined from these aligned sequences may also contain gap(s) or deletion(s). Although not explicitly mentioned throughout the disclosure, a skilled person readily envisions that the conserved sequence comprises gap(s) or deletion(s) which were generated by the sequence alignment.

[0015] Thus, this conserved amino acid sequence GXKXGX₈GXKXGGX₂PXNX₇NHQSX₃LFX₄GX₈NX₂TAXRTAAX₄SX₃LX₈GX₂GAGXQ X₃QX₁₅WNX₃₉SX₁₅HX₃MGTDTX₂KXEX₁₃DX₃QX₄GEXQX₁₆GX₉RX₆TX₂DGXGX₃QDX A (SEQ ID NO: 610) consists of 251 amino acids or less, wherein each X represents independently of each other exactly one amino acid or a gap. More preferably each X represents independently of each other exactly one proteinogenic amino acids and more preferably exactly one canonic amino acid.

[0016] In other words, the present invention is directed to a method of preparing a primary amine compound of general formula (IB)

[chemical structure]

wherein R¹ and R² are independently selected from a hydrogen atom, and optionally substituted alkyl, alkenyl, alkynyl, alkoxy, carboxy, aminocarbonyl, thiocarbonyl, heteroalkyl, heteroalkenyl, heteroalkynyl, carboxyalkyl, aminoalkyl, haloalkyl, alkylthioalkyl, cycloalkyl, aryl, arylalkyl, heterocycloalkyl, heteroaryl, and heteroarylalkyl; and optionally R¹ and R² are linked to form a 3-membered to 10-membered ring;
comprising:
[0017] A1) Providing an imine compound of general formula (IIA)

[chemical structure]

[0018] wherein R¹ and R² have the meanings as defined for formula (IB); and
[0019] B1) Reacting imine compound of general formula (IIA) with a polypeptide having the enzymatic activity of an imine reductase in the presence of a cofactor, to afford primary amine of general formula (IB),
   wherein the polypeptide comprises the conserved amino acid sequence of GXKXGX₈GXKXGGX₂PXNX₇NHQSX₃LFX₄GX₈NX₂TAXRTAAX₄SX₃LX₈GX₂GAGXQ X₃QX₁₅WNX₃₉SX₁₅HX₃MGTDTX₂KXEX₁₃DX₃QX₄GEXQX₁₆GX₉RX₆TX₂DGXGX₃QDX A (SEQ ID NO: 610), wherein X represents independently for each occurrence an amino acid or a gap.

[0020] In one embodiment, the present invention is directed to a method of preparing a primary amine compound of general formula (IB)

[chemical structure]

wherein R¹ and R² are independently selected from a hydrogen atom, and optionally substituted alkyl, alkenyl, alkynyl, alkoxy, carboxy, aminocarbonyl, thiocarbonyl, heteroalkyl, heteroalkenyl, heteroalkynyl, carboxyalkyl, aminoalkyl, haloalkyl, alkylthioalkyl, cycloalkyl, aryl, arylalkyl, heterocycloalkyl, heteroaryl, and heteroarylalkyl; and optionally R¹ and R² are linked to form a 3-membered to 10-membered ring;
comprising:
[0021] A1) Providing an imine compound of general formula (IIA)

[chemical structure]

[0022] wherein R¹ and R² have the meanings as defined for formula (IB); and
[0023] B1) Reacting imine compound of general formula (IIA) with a polypeptide having the enzymatic activity of an imine reductase in the presence of a cofactor, to afford primary amine of general formula (IB),
   wherein the polypeptide comprises the conserved amino acid sequence as set forth in SEQ ID NO: 610, wherein X represents independently for each occurrence an amino acid.

[0024] In one embodiment, the present invention is directed to a method of preparing a primary amine compound of general formula (IB)

[chemical structure]

wherein R¹ and R² are independently selected from a hydrogen atom, and optionally substituted alkyl, alkenyl, alkynyl, alkoxy, carboxy, aminocarbonyl, thiocarbonyl, heteroalkyl, heteroalkenyl, heteroalkynyl, carboxyalkyl, aminoalkyl, haloalkyl, alkylthioalkyl, cycloalkyl, aryl, arylalkyl, heterocycloalkyl, heteroaryl, and heteroarylalkyl; and optionally R¹ and R² are linked to form a 3-membered to 10-membered ring;
comprising:
[0025] A1) Providing an imine compound of general formula (IIA)

[chemical structure]

[0026] wherein R¹ and R² have the meanings as defined for formula (IB); and
[0027] B1) Reacting imine compound of general formula (IIA) with a polypeptide having the enzymatic activity of an imine reductase in the presence of a cofactor, to afford primary amine of general formula (IB),
   wherein the polypeptide comprises the conserved amino acid sequence as set forth in SEQ ID NO: 611.

[0028] In one embodiment, the method of preparing a primary amine compound of general formula (IB) comprises:

[chemical structure]

[0029] A1) Providing an imine compound of general formula (IIA); and

[chemical structure]

[0030] B1) Reacting imine compound of general formula (IIA) with a polypeptide having the enzymatic activity of an imine reductase in the presence of a cofactor, to afford primary amine of general formula (IB),
   wherein the polypeptide comprises a conserved amino acid sequence as set forth in SEQ ID NO: 610; and
   wherein R¹ and R² are independently selected from a hydrogen atom, and optionally substituted linear C₁-C₈ alkyl, branched C₃-C₈ alkyl, linear C₂-C₈ alkenyl, branched C₂-C₈ alkenyl, linear C₂-C₈ alkynyl, branched C₂-C₈ alkynyl, C₃-C₈ cycloalkyl, C₁-C₁₀ heteroaryl, C₂-C₉ heterocyclyl, C₁-C₈ alkoxy, carboxy, aminocarbonyl, thiocarbonyl, C₁-C₈ aminoalkyl, C₁-C₈ aminocarbonylalkyl, C₁-C₈ carboxyalkyl, C₁-C₈ haloalkyl, C₁-C₈ alkylthioalkyl, aryl, C₁-C₈ arylalkyl, C₁-C₈ heterocycloalkyl, heteroaryl, and C₁-C₈ heteroarylalkyl; and optionally R¹ and R² are linked to form a 3-membered to 10-membered ring.

[0031] Preferably, the polypeptide comprises a conserved amino acid sequence selected from the sequences as set forth in SEQ ID NO: 611 to 621.

[0032] Preferably, R¹ represents —CH₃, —COOR⁵, —COSR⁵, —CSSR⁵, —CONHR⁵, —CONR⁵R⁶, —CH═CH—COOR⁵, —CH═CH—COSR⁵, —CH═CH—CSSR⁵, —CH═CH—CONHR⁵, —CH═CH—CONR⁵R⁶, —C≡C—COOR⁵, —C≡C—COSR⁵, —C≡C—CSSR⁵, —C≡C—CONHR⁵ or —C≡C—CONR⁵R⁶.

[0033] Preferably, R² represents —H, —X¹, —CH₃, —CF₃, -Ph, —CH₂Y¹, —CH(Y¹)Y², cyclo-C₃H₅, cyclo-C₄H₇, cyclo-C₅H₉, cyclo-C₆H₁₁, cyclo-C₇H₁₃, Cyclo-C₈H₁₅, —CH(OH)X¹, —C(O)Y¹, —CH(X¹)X², —CH₂CH₂X¹, —(CH₂)₃X¹, —CH₂C(O)X¹ or —C(O)CH₂X¹.

[0034] Preferably, X¹ and X² are independently selected from —CN, —COOR⁷, —COOR⁸, —COSR⁷, —COSR⁸, —CSSR⁷, —CSSR⁸, —CONHR⁷, —CONHR⁸, —CONR⁷R⁹ or —CONR⁸R¹⁰.

[0035] Preferably, Y¹, Y² and Y³ are independently selected from —X¹, —X², —R¹³, —R¹⁴, or —R¹⁵.

[0036] Preferably, R⁵-R¹⁵ represent independently of each other —H, cyclo-C₃H₅, cyclo-C₄H₇, cyclo-C₅H₉, cyclo-C₆H₁₁, cyclo-C₇H₁₃, cyclo-C₈H₁₅, -Ph, —CH₂-Ph, —CPh₃, —CH₃, —C₂H₅, —C₃H₇, —CH(CH₃)₂, —C₄H₉, —CH₂—CH(CH₃)₂, —CH(CH₃)—C₂H₅, —C(CH₃)₃, —C₅H₁₁, —CH(CH₃)—C₃H₇, —CH₂—CH(CH₃)—C₂H₅, —CH(CH₃)—CH(CH₃)₂, —C(CH₃)₂—C₂H₅, —CH₂—C(CH₃)₃, —CH(C₂H₅)₂, —C₂H₄—CH(CH₃)₂, —C₆H₁₃, —C₃H₆—CH(CH₃)₂, —C₂H₄—CH(CH₃)—C₂H₅, —CH(CH₃)—C₄H₉, —CH₂—CH(CH₃)—C₃H₇, —CH(CH₃)—CH₂—CH(CH₃)₂, —CH(CH₃)—CH(CH₃)—C₂H₅, —CH₂—CH(CH₃)—CH(CH₃)₂, —CH₂—C(CH₃)₂—C₂H₅, —C(CH₃)₂—C₃H₇, —C(CH₃)₂—CH(CH₃)₂, —C₂H₄—C(CH₃)₃, —CH(CH₃)—C(CH₃)₃, —CH═CH₂, —CH₂—CH═CH₂, —C(CH₃)═CH₂, —CH═CH—CH₃, —C₂H₄—CH═CH₂, —C₇H₁₅, —C₈H₁₇, —CH₂—CH═CH—CH₃, —CH═CH—C₂H₅, —CH₂—C(CH₃)═CH₂, —CH(CH₃)—CH═CH, —CH═C(CH₃)₂, —C(CH₃)═CH—CH₃, —CH═CH—CH═CH₂, —C₃H₆—CH═CH₂, —C₂H₄—CH═CH—CH₃, —CH₂—CH═CH—C₂H₅, —CH═CH—C₃H₇, —CH₂—CH═CH—CH═CH₂, —CH═CH—CH═CH—CH₃, —CH₂NH₂, —CH₂OH, —CH₂SH, —CH₂—CH₂NH₂, —CH₂—CH₂SH, —C₆H₄—OCH₃, —C₆H₄—OH, —CH₂—CH₂—OCH₃, —CH₂—CH₂OH, —CH₂—OCH₃, —CH₂—C₆H₄—OCH₃, —CH₂—C₆H₄—OH.

[0037] Preferably, R¹ and R² join to form a 5-membered or 6-membered carbocyclic or heterocyclic ring, R¹ and R² being independently selected from:

[chemical structure]

[chemical structure]

wherein Y⁸ represents —H, —CH₃, —C₂H₅, —C₃H₇, —C₄He, —CH(CH₃)₂, —CH₂CH(CH₃)₂, —CH(CH₃)—C₂H₅, —C(CH₃)₃ or -cyclo-C₃H₅.

[0038] In one embodiment of the present invention R¹ and R² are linked to form a 3-membered to 10-membered ring selected from: cyclopropane, cyclobutane, cyclopentane, cyclohexane, cycloheptane, cyclooctane, cyclononane or cylodecane.

[0039] Thus, the present invention is also directed to a method of preparing a primary amine compound of general formula (IB), comprising the steps of:
[0040] A1) Providing an imine compound of general formula (IIA); and
[0041] B1) Reacting imine compound of general formula (IIA) with a polypeptide having the enzymatic activity of an imine reductase in the presence of a cofactor, to afford primary amine of general formula (IB),
   wherein the polypeptide comprises the conserved amino acid sequence as set forth in SEQ ID NO: 610; and
   wherein R¹ represents —CH₃, —COOR⁵, —COSR⁵, —CSSR⁵, —CONHR⁵, —CONR⁵R⁶, —CH═CH—COOR⁵, —CH═CH—COSR⁵, —CH═CH—CSSR⁵, —CH═CH—CONHR⁵, —CH═CH—CONR⁵R⁶, —C≡C—COOR⁵, —C≡C—COSR⁵, —C≡C—CSSR⁵, —C≡C—CONHR⁵ or —C≡C—CONR⁵R⁶;
   R² represents —H, —X¹, —CH₃, —CF₃, -Ph, —CH₂Y¹, —CH(Y¹)Y², cyclo-C₃H₅, cyclo-C₄H₇, cyclo-C₅H, cyclo-C₆H₁₁, cyclo-C₇H₁₃, cyclo-C₈H₁₅, —CH(OH)X¹, —C(O)Y¹, —CH(X¹)X², —CH₂CH₂X¹, —(CH₂)₃X¹, —CH₂C(O)X¹ or —C(O)CH₂X¹;
   X¹ and X² are independently selected from —CN, —COOR⁷, —COOR⁸, —COSR⁷, —COSR⁸, —CSSR⁷, —CSSR⁸, —CONHR⁷, —CONHR⁸, —CONR⁷R⁹ or —CONR⁸R¹⁰;
   Y¹, Y² and Y³ are independently selected from —X¹, —X², —R¹³, —R¹⁴, or —R¹⁵;
   R⁵-R¹⁵ represent independently of each other —H, cyclo-C₃H₅, cyclo-C₄H₇, cyclo-C₅H₉, cyclo-C₆H₁₁, cyclo-C₇H₁₃, cyclo-C₈H₁₅, -Ph, —CH₂-Ph, —CPh₃, —CH₃, —C₂H₅, —C₃H₇, —CH(CH₃)₂, —C₄H₉, —CH₂—CH(CH₃)₂, —CH(CH₃)—C₂H₅, —C(CH₃)₃, —C₅H₁₁, —CH(CH₃)—C₃H₇, —CH₂—CH(CH₃)—C₂H₅, —CH(CH₃)—CH(CH₃)₂, —C(CH₃)₂—C₂H₅, —CH₂—C(CH₃)₃, —CH(C₂H₅)₂, —C₂H₄—CH(CH₃)₂, —C₆H₁₃, —C₃H₆—CH(CH₃)₂, —C₂H₄—CH(CH₃)—C₂H₅, —CH(CH₃)—C₄H₉, —CH₂—CH(CH₃)—C₃H₇, —CH(CH₃)—CH₂—CH(CH₃)₂, —CH(CH₃)—CH(CH₃)—C₂H₅, —CH₂—CH(CH₃)—CH(CH₃)₂, —CH₂—C(CH₃)₂—C₂H₅, —C(CH₃)₂—C₃H₇, —C(CH₃)₂—CH(CH₃)₂, —C₂H₄—C(CH₃)₃, —CH(CH₃)—C(CH₃)₃, —CH═CH₂, —CH₂—CH═CH₂, —C(CH₃)═CH₂, —CH═CH—CH₃, —C₂H₄—CH═CH₂, —C₇H₁₅, —C₈H₁₇, —CH₂—CH═CH—CH₃, —CH═CH—C₂H₅, —CH₂—C(CH₃)═CH₂, —CH(CH₃)—CH═CH, —CH═C(CH₃)₂, —C(CH₃)═CH—CH₃, —CH═CH—CH═CH₂, —C₃H₆—CH═CH₂, —C₂H₄—CH═CH—CH₃, —CH₂—CH═CH—C₂H₅, —CH═CH—C₃H₇, —CH₂—CH═CH—CH═CH₂, —CH═CH—CH═CH—CH₃, —CH₂NH₂, —CH₂OH, —CH₂SH, —CH₂—CH₂NH₂, —CH₂—CH₂SH, —C₆H₄—OCH₃, —C₆H₄—OH, —CH₂—CH₂—OCH₃, —CH₂—CH₂OH, —CH₂—OCH₃, —CH₂—C₆H₄—OCH₃ or —CH₂—C₆H₄—OH.

[0042] Preferably, the method of preparing a primary amine compound of general formula (IB) comprises the steps of:
[0043] A1) Providing an imine compound of general formula (IIA); and
[0044] B1) Reacting imine compound of general formula (IIA) with a polypeptide having the enzymatic activity of an imine reductase in the presence of a cofactor, to afford primary amine of general formula (IB),
   wherein the polypeptide comprises a conserved amino acid sequence selected from the sequences as set forth in SEQ ID NO 611 to 621; and
   wherein R¹ represents —CH₃, —COOR⁵, —COSR⁵, —CSSR⁵, —CONHR⁵, —CONR⁵R⁶, —CH═CH—COOR⁵, —CH═CH—COSR⁵, —CH═CH—CSSR⁵, —CH═CH—CONHR⁵, —CH═CH—CONR⁵R⁶, —C≡C—COOR⁵, —C≡C—COSR⁵, —C≡C—CSSR⁵, —C≡C—CONHR⁵ or —C≡C—CONR⁵R⁶;
   R² represents —H, —X¹, —CH₃, —CF₃, -Ph, —CH₂Y¹, —CH(Y¹)Y², cyclo-C₃H₅, cyclo-C₄H₇, cyclo-C₅H, cyclo-C₆H₁₁, cyclo-C₇H₁₃, cyclo-C₈H₁₅, —CH(OH)X¹, —C(O)Y¹, —CH(X¹)X², —CH₂CH₂X¹, —(CH₂)₃X¹, —CH₂C(O)X¹ or —C(O)CH₂X¹;
   X¹ and X² are independently selected from —CN, —COOR⁷, —COOR⁸, —COSR⁷, —COSR⁸, —CSSR⁷, —CSSR⁸, —CONHR⁷, —CONHR⁸, —CONR⁷R⁹ or —CONR⁸R¹⁰;
   Y¹, Y² and Y³ are independently selected from —X¹, —X², —R¹³, —R¹⁴, or —R¹⁵;
   R⁵-R¹⁵ represent independently of each other —H, cyclo-C₃H₅, cyclo-C₄H₇, cyclo-C₅H₉, cyclo-C₆H₁₁, cyclo-C₇H₁₃, cyclo-C₈H₁₅, -Ph, —CH₂-Ph, —CPh₃, —CH₃, —C₂H₅, —C₃H₇, —CH(CH₃)₂, —C₄H₉, —CH₂—CH(CH₃)₂, —CH(CH₃)—C₂H₅, —C(CH₃)₃, —C₅H₁₁, —CH(CH₃)—C₃H₇, —CH₂—CH(CH₃)—C₂H₅, —CH(CH₃)—CH(CH₃)₂, —C(CH₃)₂—C₂H₅, —CH₂—C(CH₃)₃, —CH(C₂H₅)₂, —C₂H₄—CH(CH₃)₂, —C₆H₁₃, —C₃H₆—CH(CH₃)₂, —C₂H₄—CH(CH₃)—C₂H₅, —CH(CH₃)—C₄H₉, —CH₂—CH(CH₃)—C₃H₇, —CH(CH₃)—CH₂—CH(CH₃)₂, —CH(CH₃)—CH(CH₃)—C₂H₅, —CH₂—CH(CH₃)—CH(CH₃)₂, —CH₂—C(CH₃)₂—C₂H₅, —C(CH₃)₂—C₃H₇, —C(CH₃)₂—CH(CH₃)₂, —C₂H₄—C(CH₃)₃, —CH(CH₃)—C(CH₃)₃, —CH═CH₂, —CH₂—CH═CH₂, —C(CH₃)═CH₂, —CH═CH—CH₃, —C₂H₄—CH═CH₂, —C₇H₁₅, —C₈H₁₇, —CH₂—CH═CH—CH₃, —CH═CH—C₂H₅, —CH₂—C(CH₃)═CH₂, —CH(CH₃)—CH═CH, —CH═C(CH₃)₂, —C(CH₃)═CH—CH₃, —CH═CH—CH═CH₂, —C₃H₆—CH═CH₂, —C₂H₄—CH═CH—CH₃, —CH₂—CH═CH—C₂H₅, —CH═CH—C₃H₇, —CH₂—CH═CH—CH═CH₂, —CH═CH—CH═CH—CH₃, —CH₂NH₂, —CH₂OH, —CH₂SH, —CH₂—CH₂NH₂, —CH₂—CH₂SH, —C₆H₄—OCH₃, —C₆H₄—OH, —CH₂—CH₂—OCH₃, —CH₂—CH₂OH, —CH₂—OCH₃, —CH₂—C₆H₄—OCH₃ or —CH₂—C₆H₄—OH.

[0045] Preferably, the method of preparing a primary amine compound of general formula (IB) comprises the steps of:
[0046] A1) Providing an imine compound of general formula (IIA); and
[0047] B1) Reacting imine compound of general formula (IIA) with a polypeptide having the enzymatic activity of an imine reductase in the presence of a cofactor, to afford primary amine of general formula (IB),
   wherein the polypeptide comprises a conserved amino acid sequence as set forth in SEQ ID NO 611; and
   wherein R¹ represents —CH₃, —COOR⁵, —COSR⁵, —CSSR⁵, —CONHR⁵, —CONR⁵R⁶, —CH═CH—COOR⁵, —CH═CH—COSR⁵, —CH═CH—CSSR⁵, —CH═CH—CONHR⁵, —CH═CH—CONR⁵R⁶, —C≡C—COOR⁵, —C≡C—COSR⁵, —C≡C—CSSR⁵, —C≡C—CONHR⁵ or —C≡C—CONR⁵R⁶;
   R² represents —H, —X¹, —CH₃, —CF₃, -Ph, —CH₂Y¹, —CH(Y¹)Y², cyclo-C₃H₅, cyclo-C₄H₇, cyclo-C₅H, cyclo-C₆H₁₁, cyclo-C₇H₁₃, cyclo-C₈H₁₅, —CH(OH)X¹, —C(O)Y¹, —CH(X¹)X², —CH₂CH₂X¹, —(CH₂)₃X¹, —CH₂C(O)X¹ or —C(O)CH₂X¹;
   X¹ and X² are independently selected from —CN, —COOR⁷, —COOR⁸, —COSR⁷, —COSR⁸, —CSSR⁷, —CSSR⁸, —CONHR⁷, —CONHR⁸, —CONR⁷R⁹ or —CONR⁸R¹⁰;
   Y¹, Y² and Y³ are independently selected from —X¹, —X², —R¹³, —R¹⁴, or —R¹⁵;
   R⁵-R¹⁵ represent independently of each other —H, cyclo-C₃H₅, cyclo-C₄H₇, cyclo-C₅H₉, cyclo-C₆H₁₁, cyclo-C₇H₁₃, cyclo-C₈H₁₅, -Ph, —CH₂-Ph, —CPh₃, —CH₃, —C₂H₅, —C₃H₇, —CH(CH₃)₂, —C₄H₉, —CH₂—CH(CH₃)₂, —CH(CH₃)—C₂H₅, —C(CH₃)₃, —C₅H₁₁, —CH(CH₃)—C₃H₇, —CH₂—CH(CH₃)—C₂H₅, —CH(CH₃)—CH(CH₃)₂, —C(CH₃)₂—C₂H₅, —CH₂—C(CH₃)₃, —CH(C₂H₅)₂, —C₂H₄—CH(CH₃)₂, —C₆H₁₃, —C₃H₆—CH(CH₃)₂, —C₂H₄—CH(CH₃)—C₂H₅, —CH(CH₃)—C₄He, —CH₂—CH(CH₃)—C₃H₇, —CH(CH₃)—CH₂—CH(CH₃)₂, —CH(CH₃)—CH(CH₃)—C₂H₅, —CH₂—CH(CH₃)—CH(CH₃)₂, —CH₂—C(CH₃)₂—C₂H₅, —C(CH₃)₂—C₃H₇, —C(CH₃)₂—CH(CH₃)₂, —C₂H₄—C(CH₃)₃, —CH(CH₃)—C(CH₃)₃, —CH═CH₂, —CH₂—CH═CH₂, —C(CH₃)═CH₂, —CH═CH—CH₃, —C₂H₄—CH═CH₂, —C₇H₁₅, —C₈H₁₇, —CH₂—CH═CH—CH₃, —CH═CH—C₂H₅, —CH₂—C(CH₃)═CH₂, —CH(CH₃)—CH═CH, —CH═C(CH₃)₂, —C(CH₃)═CH—CH₃, —CH═CH—CH═CH₂, —C₃H₆—CH═CH₂, —C₂H₄—CH═CH—CH₃, —CH₂—CH═CH—C₂H₅, —CH═CH—C₃H₇, —CH₂—CH═CH—CH═CH₂, —CH═CH—CH═CH—CH₃, —CH₂NH₂, —CH₂OH, —CH₂SH, —CH₂—CH₂NH₂, —CH₂—CH₂SH, —C₆H₄—OCH₃, —C₆H₄—OH, —CH₂—CH₂—OCH₃, —CH₂—CH₂OH, —CH₂—OCH₃, —CH₂—C₆H₄—OCH₃ or —CH₂—C₆H₄—OH.

[0048] Preferably, the method of preparing a primary amine compound of general formula (IB) comprises the steps of:
[0049] A1) Providing an imine compound of general formula (IIA); and
[0050] B1) Reacting imine compound of general formula (IIA) with a polypeptide having the enzymatic activity of an imine reductase in the presence of a cofactor, to afford primary amine of general formula (IB),
   wherein the polypeptide comprises a conserved amino acid sequence as set forth in SEQ ID NO 612; and
   wherein R¹ represents —CH₃, —COOR⁵, —COSR⁵, —CSSR⁵, —CONHR⁵, —CONR⁵R⁶, —CH═CH—COOR⁵, —CH═CH—COSR⁵, —CH═CH—CSSR⁵, —CH═CH—CONHR⁵, —CH═CH—CONR⁵R⁶, —C≡C—COOR⁵, —C≡C—COSR⁵, —C≡C—CSSR⁵, —C≡C—CONHR⁵ or —C≡C—CONR⁵R⁶;
   R² represents —H, —X¹, —CH₃, —CF₃, -Ph, —CH₂Y¹, —CH(Y¹)Y², cyclo-C₃H₅, cyclo-C₄H₇, cyclo-C₅H₉, cyclo-C₆H₁₁, cyclo-C₇H₁₃, cyclo-C₈H₁₅, —CH(OH)X¹, —C(O)Y¹, —CH(X¹)X², —CH₂CH₂X¹, —(CH₂)₃X¹, —CH₂C(O)X¹ or —C(O)CH₂X¹;
   X¹ and X² are independently selected from —CN, —COOR⁷, —COOR⁸, —COSR⁷, —COSR⁸, —CSSR⁷, —CSSR⁸, —CONHR⁷, —CONHR⁸, —CONR⁷R⁹ or —CONR⁸R¹⁰;
   Y¹, Y² and Y³ are independently selected from —X¹, —X², —R¹³, —R¹⁴, or —R¹⁵;
   R⁵-R¹⁵ represent independently of each other —H, cyclo-C₃H₅, cyclo-C₄H₇, cyclo-C₅H₉, cyclo-C₆H₁₁, cyclo-C₇H₁₃, cyclo-C₈H₁₅, -Ph, —CH₂-Ph, —CPh₃, —CH₃, —C₂H₅, —C₃H₇, —CH(CH₃)₂, —C₄H₉, —CH₂—CH(CH₃)₂, —CH(CH₃)—C₂H₅, —C(CH₃)₃, —C₅H₁₁, —CH(CH₃)—C₃H₇, —CH₂—CH(CH₃)—C₂H₅, —CH(CH₃)—CH(CH₃)₂, —C(CH₃)₂—C₂H₅, —CH₂—C(CH₃)₃, —CH(C₂H₅)₂, —C₂H₄—CH(CH₃)₂, —C₆H₁₃, —C₃H₆—CH(CH₃)₂, —C₂H₄—CH(CH₃)—C₂H₅, —CH(CH₃)—C₄H₉, —CH₂—CH(CH₃)—C₃H₇, —CH(CH₃)—CH₂—CH(CH₃)₂, —CH(CH₃)—CH(CH₃)—C₂H₅, —CH₂—CH(CH₃)—CH(CH₃)₂, —CH₂—C(CH₃)₂—C₂H₅, —C(CH₃)₂—C₃H₇, —C(CH₃)₂—CH(CH₃)₂, —C₂H₄—C(CH₃)₃, —CH(CH₃)—C(CH₃)₃, —CH═CH₂, —CH₂—CH═CH₂, —C(CH₃)═CH₂, —CH═CH—CH₃, —C₂H₄—CH═CH₂, —C₇H₁₅, —C₈H₁₇, —CH₂—CH═CH—CH₃, —CH═CH—C₂H₅, —CH₂—C(CH₃)═CH₂, —CH(CH₃)—CH═CH, —CH═C(CH₃)₂, —C(CH₃)═CH—CH₃, —CH═CH—CH═CH₂, —C₃H₆—CH═CH₂, —C₂H₄—CH═CH—CH₃, —CH₂—CH═CH—C₂H₅, —CH═CH—C₃H₇, —CH₂—CH═CH—CH═CH₂, —CH═CH—CH═CH—CH₃, —CH₂NH₂, —CH₂OH, —CH₂SH, —CH₂—CH₂NH₂, —CH₂—CH₂SH, —C₆H₄—OCH₃, —C₆H₄—OH, —CH₂—CH₂—OCH₃, —CH₂—CH₂OH, —CH₂—OCH₃, —CH₂—C₆H₄—OCH₃ or —CH₂—C₆H₄—OH.

[0051] Preferably, the method of preparing a primary amine compound of general formula (IB) comprises the steps of:
[0052] A1) Providing an imine compound of general formula (IIA); and
[0053] B1) Reacting imine compound of general formula (IIA) with a polypeptide having the enzymatic activity of an imine reductase in the presence of a cofactor, to afford primary amine of general formula (IB),
   wherein the polypeptide comprises a conserved amino acid sequence as set forth in SEQ ID NO 617; and
   wherein R¹ represents —CH₃, —COOR⁵, —COSR⁵, —CSSR⁵, —CONHR⁵, —CONR⁵R⁶, —CH═CH—COOR⁵, —CH═CH—COSR⁵, —CH═CH—CSSR⁵, —CH═CH—CONHR⁵, —CH═CH—CONR⁵R⁶, —C≡C—COOR⁵, —C≡C—COSR⁵, —C≡C—CSSR⁵, —C≡C—CONHR⁵ or —C≡C—CONR⁵R⁶;
   R² represents —H, —X¹, —CH₃, —CF₃, -Ph, —CH₂Y¹, —CH(Y¹)Y², cyclo-C₃H₅, cyclo-C₄H₇, cyclo-C₅H₉, cyclo-C₆H₁₁, cyclo-C₇H₁₃, cyclo-C₈H₁₅, —CH(OH)X¹, —C(O)Y¹, —CH(X¹)X², —CH₂CH₂X¹, —(CH₂)₃X¹, —CH₂C(O)X¹ or —C(O)CH₂X¹; X¹ and X² are independently selected from —CN, —COOR⁷, —COOR⁸, —COSR⁷, —COSR⁸, —CSSR⁷, —CSSR⁸, —CONHR⁷, —CONHR⁸, —CONR⁷R⁹ or —CONR⁸R¹⁰;
   Y¹, Y² and Y³ are independently selected from —X¹, —X², —R¹³, —R¹⁴, or —R¹⁵;
   R⁵-R¹⁵ represent independently of each other —H, cyclo-C₃H₅, cyclo-C₄H₇, cyclo-C₅H₉, cyclo-C₆H₁₁, cyclo-C₇H₁₃, cyclo-C₈H₁₅, -Ph, —CH₂-Ph, —CPh₃, —CH₃, —C₂H₅, —C₃H₇, —CH(CH₃)₂, —C₄H₉, —CH₂—CH(CH₃)₂, —CH(CH₃)—C₂H₅, —C(CH₃)₃, —C₅H₁₁, —CH(CH₃)—C₃H₇, —CH₂—CH(CH₃)—C₂H₅, —CH(CH₃)—CH(CH₃)₂, —C(CH₃)₂—C₂H₅, —CH₂—C(CH₃)₃, —CH(C₂H₅)₂, —C₂H₄—CH(CH₃)₂, —C₆H₁₃, —C₃H₆—CH(CH₃)₂, —C₂H₄—CH(CH₃)—C₂H₅, —CH(CH₃)—C₄He, —CH₂—CH(CH₃)—C₃H₇, —CH(CH₃)—CH₂—CH(CH₃)₂, —CH(CH₃)—CH(CH₃)—C₂H₅, —CH₂—CH(CH₃)—CH(CH₃)₂, —CH₂—C(CH₃)₂—C₂H₅, —C(CH₃)₂—C₃H₇, —C(CH₃)₂—CH(CH₃)₂, —C₂H₄—C(CH₃)₃, —CH(CH₃)—C(CH₃)₃, —CH═CH₂, —CH₂—CH═CH₂, —C(CH₃)═CH₂, —CH═CH—CH₃, —C₂H₄—CH═CH₂, —C₇H₁₅, —C₈H₁₇, —CH₂—CH═CH—CH₃, —CH═CH—C₂H₅, —CH₂—C(CH₃)═CH₂, —CH(CH₃)—CH═CH, —CH═C(CH₃)₂, —C(CH₃)═CH—CH₃, —CH═CH—CH═CH₂, —C₃H₆—CH═CH₂, —C₂H₄—CH═CH—CH₃, —CH₂—CH═CH—C₂H₅, —CH═CH—C₃H₇, —CH₂—CH═CH—CH═CH₂, —CH═CH—CH═CH—CH₃, —CH₂NH₂, —CH₂OH, —CH₂SH, —CH₂—CH₂NH₂, —CH₂—CH₂SH, —C₆H₄—OCH₃, —C₆H₄—OH, —CH₂—CH₂—OCH₃, —CH₂—CH₂OH, —CH₂—OCH₃, —CH₂—C₆H₄—OCH₃ or —CH₂—C₆H₄—OH.

[0054] Preferably, the method of preparing a primary amine compound of general formula (IB) comprises the steps of:
[0055] A1) Providing an imine compound of general formula (IIA); and
[0056] B1) Reacting imine compound of general formula (IIA) with a polypeptide having the enzymatic activity of an imine reductase in the presence of a cofactor, to afford primary amine of general formula (IB),
   wherein the polypeptide comprises a conserved amino acid sequence as set forth in SEQ ID NO 618; and
   wherein R¹ represents —CH₃, —COOR⁵, —COSR⁵, —CSSR⁵, —CONHR⁵, —CONR⁵R⁶, —CH═CH—COOR⁵, —CH═CH—COSR⁵, —CH═CH—CSSR⁵, —CH═CH—CONHR⁵, —CH═CH—CONR⁵R⁶, —C≡C—COOR⁵, —C≡C—COSR⁵, —C≡C—CSSR⁵, —C≡C—CONHR⁵ or —C≡C—CONR⁵R⁶;
   R² represents —H, —X¹, —CH₃, —CF₃, -Ph, —CH₂Y¹, —CH(Y¹)Y², cyclo-C₃H₅, cyclo-C₄H₇, cyclo-C₅H, cyclo-C₆H₁₁, cyclo-C₇H₁₃, cyclo-C₈H₁₅, —CH(OH)X¹, —C(O)Y¹, —CH(X¹)X², —CH₂CH₂X¹, —(CH₂)₃X¹, —CH₂C(O)X¹ or —C(O)CH₂X¹;
   X¹ and X² are independently selected from —CN, —COOR⁷, —COOR⁸, —COSR⁷, —COSR⁸, —CSSR⁷, —CSSR⁸, —CONHR⁷, —CONHR⁸, —CONR⁷R⁹ or —CONR⁸R¹⁰;
   Y¹, Y² and Y³ are independently selected from —X¹, —X², —R¹³, —R¹⁴, or —R¹⁵;
   R⁵-R¹⁵ represent independently of each other —H, cyclo-C₃H₅, cyclo-C₄H₇, cyclo-C₅H₉, cyclo-C₆H₁₁, cyclo-C₇H₁₃, cyclo-C₈H₁₅, -Ph, —CH₂-Ph, —CPh₃, —CH₃, —C₂H₅, —C₃H₇, —CH(CH₃)₂, —C₄H₉, —CH₂—CH(CH₃)₂, —CH(CH₃)—C₂H₅, —C(CH₃)₃, —C₅H₁₁, —CH(CH₃)—C₃H₇, —CH₂—CH(CH₃)—C₂H₅, —CH(CH₃)—CH(CH₃)₂, —C(CH₃)₂—C₂H₅, —CH₂—C(CH₃)₃, —CH(C₂H₅)₂, —C₂H₄—CH(CH₃)₂, —C₆H₁₃, —C₃H₆—CH(CH₃)₂, —C₂H₄—CH(CH₃)—C₂H₅, —CH(CH₃)—C₄H₉, —CH₂—CH(CH₃)—C₃H₇, —CH(CH₃)—CH₂—CH(CH₃)₂, —CH(CH₃)—CH(CH₃)—C₂H₅, —CH₂—CH(CH₃)—CH(CH₃)₂, —CH₂—C(CH₃)₂—C₂H₅, —C(CH₃)₂—C₃H₇, —C(CH₃)₂—CH(CH₃)₂, —C₂H₄—C(CH₃)₃, —CH(CH₃)—C(CH₃)₃, —CH═CH₂, —CH₂—CH═CH₂, —C(CH₃)═CH₂, —CH═CH—CH₃, —C₂H₄—CH═CH₂, —C₇H₁₅, —C₈H₁₇, —CH₂—CH═CH—CH₃, —CH═CH—C₂H₅, —CH₂—C(CH₃)═CH₂, —CH(CH₃)—CH═CH, —CH═C(CH₃)₂, —C(CH₃)═CH—CH₃, —CH═CH—CH═CH₂, —C₃H₆—CH═CH₂, —C₂H₄—CH═CH—CH₃, —CH₂—CH═CH—C₂H₅, —CH═CH—C₃H₇, —CH₂—CH═CH—CH═CH₂, —CH═CH—CH═CH—CH₃, —CH₂NH₂, —CH₂OH, —CH₂SH, —CH₂—CH₂NH₂, —CH₂—CH₂SH, —C₆H₄—OCH₃, —C₆H₄—OH, —CH₂—CH₂—OCH₃, —CH₂—CH₂OH, —CH₂—OCH₃, —CH₂—C₆H₄—OCH₃ or —CH₂—C₆H₄—OH.

[0057] Preferably, the method of preparing a primary amine compound of general formula (IB) comprises the steps of:
[0058] A1) Providing an imine compound of general formula (IIA); and
[0059] B1) Reacting imine compound of general formula (IIA) with a polypeptide having the enzymatic activity of an imine reductase in the presence of a cofactor, to afford primary amine of general formula (IB),
   wherein the polypeptide comprises a conserved amino acid sequence as set forth in SEQ ID NO 619; and
   wherein R¹ represents —CH₃, —COOR⁵, —COSR⁵, —CSSR⁵, —CONHR⁵, —CONR⁵R⁶, —CH═CH—COOR⁵, —CH═CH—COSR⁵, —CH═CH—CSSR⁵, —CH═CH—CONHR⁵, —CH═CH—CONR⁵R⁶, —C≡C—COOR⁵, —C≡C—COSR⁵, —C≡C—CSSR⁵, —C≡C—CONHR⁵ or —C≡C—CONR⁵R⁶;
   R² represents —H, —X¹, —CH₃, —CF₃, -Ph, —CH₂Y¹, —CH(Y¹)Y², cyclo-C₃H₅, cyclo-C₄H₇, cyclo-C₅H, cyclo-C₆H₁₁, cyclo-C₇H₁₃, cyclo-C₈H₁₅, —CH(OH)X¹, —C(O)Y¹, —CH(X¹)X², —CH₂CH₂X¹, —(CH₂)₃X¹, —CH₂C(O)X¹ or —C(O)CH₂X¹;
   X¹ and X² are independently selected from —CN, —COOR⁷, —COOR⁸, —COSR⁷, —COSR⁸, —CSSR⁷, —CSSR⁸, —CONHR⁷, —CONHR⁸, —CONR⁷R⁹ or —CONR⁸R¹⁰;
   Y¹, Y² and Y³ are independently selected from —X¹, —X², —R¹³, —R¹⁴, or —R¹⁵;
   R⁵-R¹⁵ represent independently of each other —H, cyclo-C₃H₅, cyclo-C₄H₇, cyclo-C₅H₉, cyclo-C₆H₁₁, cyclo-C₇H₁₃, cyclo-C₈H₁₅, -Ph, —CH₂-Ph, —CPh₃, —CH₃, —C₂H₅, —C₃H₇, —CH(CH₃)₂, —C₄H₉, —CH₂—CH(CH₃)₂, —CH(CH₃)—C₂H₅, —C(CH₃)₃, —C₅H₁₁, —CH(CH₃)—C₃H₇, —CH₂—CH(CH₃)—C₂H₅, —CH(CH₃)—CH(CH₃)₂, —C(CH₃)₂—C₂H₅, —CH₂—C(CH₃)₃, —CH(C₂H₅)₂, —C₂H₄—CH(CH₃)₂, —C₆H₁₃, —C₃H₆—CH(CH₃)₂, —C₂H₄—CH(CH₃)—C₂H₅, —CH(CH₃)—C₄He, —CH₂—CH(CH₃)—C₃H₇, —CH(CH₃)—CH₂—CH(CH₃)₂, —CH(CH₃)—CH(CH₃)—C₂H₅, —CH₂—CH(CH₃)—CH(CH₃)₂, —CH₂—C(CH₃)₂—C₂H₅, —C(CH₃)₂—C₃H₇, —C(CH₃)₂—CH(CH₃)₂, —C₂H₄—C(CH₃)₃, —CH(CH₃)—C(CH₃)₃, —CH═CH₂, —CH₂—CH═CH₂, —C(CH₃)═CH₂, —CH═CH—CH₃, —C₂H₄—CH═CH₂, —C₇H₁₅, —C₈H₁₇, —CH₂—CH═CH—CH₃, —CH═CH—C₂H₅, —CH₂—C(CH₃)═CH₂, —CH(CH₃)—CH═CH, —CH═C(CH₃)₂, —C(CH₃)═CH—CH₃, —CH═CH—CH═CH₂, —C₃H₆—CH═CH₂, —C₂H₄—CH═CH—CH₃, —CH₂—CH═CH—C₂H₅, —CH═CH—C₃H₇, —CH₂—CH═CH—CH═CH₂, —CH═CH—CH═CH—CH₃, —CH₂NH₂, —CH₂OH, —CH₂SH, —CH₂—CH₂NH₂, —CH₂—CH₂SH, —C₆H₄—OCH₃, —C₆H₄—OH, —CH₂—CH₂—OCH₃, —CH₂—CH₂OH, —CH₂—OCH₃, —CH₂—C₆H₄—OCH₃ or —CH₂—C₆H₄—OH.

[0060] Preferably, the method of preparing a primary amine compound of general formula (IB) comprises the steps of:
[0061] A1) Providing an imine compound of general formula (IIA); and
[0062] B1) Reacting imine compound of general formula (IIA) with a polypeptide having the enzymatic activity of an imine reductase in the presence of a cofactor, to afford primary amine of general formula (IB),
   wherein the polypeptide comprises a conserved amino acid sequence as set forth in SEQ ID NO 620; and
   wherein R¹ represents —CH₃, —COOR⁵, —COSR⁵, —CSSR⁵, —CONHR⁵, —CONR⁵R⁶, —CH═CH—COOR⁵, —CH═CH—COSR⁵, —CH═CH—CSSR⁵, —CH═CH—CONHR⁵, —CH═CH—CONR⁵R⁶, —C≡C—COOR⁵, —C≡C—COSR⁵, —C≡C—CSSR⁵, —C≡C—CONHR⁵ or —C≡C—CONR⁵R⁶;
   R² represents —H, —X¹, —CH₃, —CF₃, -Ph, —CH₂Y¹, —CH(Y¹)Y², cyclo-C₃H₅, cyclo-C₄H₇, cyclo-C₅H, cyclo-C₆H₁₁, cyclo-C₇H₁₃, cyclo-C₈H₁₅, —CH(OH)X¹, —C(O)Y¹, —CH(X¹)X², —CH₂CH₂X¹, —(CH₂)₃X¹, —CH₂C(O)X¹ or —C(O)CH₂X¹; X¹ and X² are independently selected from —CN, —COOR⁷, —COOR⁸, —COSR⁷, —COSR⁸, —CSSR⁷, —CSSR⁸, —CONHR⁷, —CONHR⁸, —CONR⁷R⁹ or —CONR⁸R¹⁰;
   Y¹, Y² and Y³ are independently selected from —X¹, —X², —R¹³, —R¹⁴, or —R¹⁵;
   R⁵-R¹⁵ represent independently of each other —H, cyclo-C₃H₅, cyclo-C₄H₇, cyclo-C₅H, cyclo-C₆H₁₁, cyclo-C₇H₁₃, cyclo-C₈H₁₅, -Ph, —CH₂-Ph, —CPh₃, —CH₃, —C₂H₅, —C₃H₇, —CH(CH₃)₂, —C₄H₉, —CH₂—CH(CH₃)₂, —CH(CH₃)—C₂H₅, —C(CH₃)₃, —C₅H₁₁, —CH(CH₃)—C₃H₇, —CH₂—CH(CH₃)—C₂H₅, —CH(CH₃)—CH(CH₃)₂, —C(CH₃)₂—C₂H₅, —CH₂—C(CH₃)₃, —CH(C₂H₅)₂, —C₂H₄—CH(CH₃)₂, —C₆H₁₃, —C₃H₆—CH(CH₃)₂, —C₂H₄—CH(CH₃)—C₂H₅, —CH(CH₃)—C₄H₉, —CH₂—CH(CH₃)—C₃H₇, —CH(CH₃)—CH₂—CH(CH₃)₂, —CH(CH₃)—CH(CH₃)—C₂H₅, —CH₂—CH(CH₃)—CH(CH₃)₂, —CH₂—C(CH₃)₂—C₂H₅, —C(CH₃)₂—C₃H₇, —C(CH₃)₂—CH(CH₃)₂, —C₂H₄—C(CH₃)₃, —CH(CH₃)—C(CH₃)₃, —CH═CH₂, —CH₂—CH═CH₂, —C(CH₃)═CH₂, —CH═CH—CH₃, —C₂H₄—CH═CH₂, —C₇H₁₅, —C₈H₁₇, —CH₂—CH═CH—CH₃, —CH═CH—C₂H₅, —CH₂—C(CH₃)═CH₂, —CH(CH₃)—CH═CH, —CH═C(CH₃)₂, —C(CH₃)═CH—CH₃, —CH═CH—CH═CH₂, —C₃H₆—CH═CH₂, —C₂H₄—CH═CH—CH₃, —CH₂—CH═CH—C₂H₅, —CH═CH—C₃H₇, —CH₂—CH═CH—CH═CH₂, —CH═CH—CH═CH—CH₃, —CH₂NH₂, —CH₂OH, —CH₂SH, —CH₂—CH₂NH₂, —CH₂—CH₂SH, —C₆H₄—OCH₃, —C₆H₄—OH, —CH₂—CH₂—OCH₃, —CH₂—CH₂OH, —CH₂—OCH₃, —CH₂—C₆H₄—OCH₃ or —CH₂—C₆H₄—OH.

[0063] Preferably, the method of preparing a primary amine compound of general formula (IB) comprises the steps of:
[0064] A1) Providing an imine compound of general formula (IIA); and
[0065] B1) Reacting imine compound of general formula (IIA) with a polypeptide having the enzymatic activity of an imine reductase in the presence of a cofactor, to afford primary amine of general formula (IB),
   wherein the polypeptide comprises a conserved amino acid sequence as set forth in SEQ ID NO 621; and
   wherein R¹ represents —CH₃, —COOR⁵, —COSR⁵, —CSSR⁵, —CONHR⁵, —CONR⁵R⁶, —CH═CH—COOR⁵, —CH═CH—COSR⁵, —CH═CH—CSSR⁵, —CH═CH—CONHR⁵, —CH═CH—CONR⁵R⁶, —C≡C—COOR⁵, —C≡C—COSR⁵, —C≡C—CSSR⁵, —C≡C—CONHR⁵ or —C≡C—CONR⁵R⁶;
   R² represents —H, —X¹, —CH₃, —CF₃, -Ph, —CH₂Y¹, —CH(Y¹)Y², cyclo-C₃H₅, cyclo-C₄H₇, cyclo-C₅H, cyclo-C₆H₁₁, cyclo-C₇H₁₃, cyclo-C₈H₁₅, —CH(OH)X¹, —C(O)Y¹, —CH(X¹)X², —CH₂CH₂X¹, —(CH₂)₃X¹, —CH₂C(O)X¹ or —C(O)CH₂X¹;
   X¹ and X² are independently selected from —CN, —COOR⁷, —COOR⁸, —COSR⁷, —COSR⁸, —CSSR⁷, —CSSR⁸, —CONHR⁷, —CONHR⁸, —CONR⁷R⁹ or —CONR⁸R¹⁰;
   Y¹, Y² and Y³ are independently selected from —X¹, —X², —R¹³, —R¹⁴, or —R¹⁵;
   R⁵-R¹⁵ represent independently of each other —H, cyclo-C₃H₅, cyclo-C₄H₇, cyclo-C₅H₉, cyclo-C₆H₁₁, cyclo-C₇H₁₃, cyclo-C₈H₁₅, -Ph, —CH₂-Ph, —CPh₃, —CH₃, —C₂H₅, —C₃H₇, —CH(CH₃)₂, —C₄H₉, —CH₂—CH(CH₃)₂, —CH(CH₃)—C₂H₅, —C(CH₃)₃, —C₅H₁₁, —CH(CH₃)—C₃H₇, —CH₂—CH(CH₃)—C₂H₅, —CH(CH₃)—CH(CH₃)₂, —C(CH₃)₂—C₂H₅, —CH₂—C(CH₃)₃, —CH(C₂H₅)₂, —C₂H₄—CH(CH₃)₂, —C₆H₁₃, —C₃H₆—CH(CH₃)₂, —C₂H₄—CH(CH₃)—C₂H₅, —CH(CH₃)—C₄H₉, —CH₂—CH(CH₃)—C₃H₇, —CH(CH₃)—CH₂—CH(CH₃)₂, —CH(CH₃)—CH(CH₃)—C₂H₅, —CH₂—CH(CH₃)—CH(CH₃)₂, —CH₂—C(CH₃)₂—C₂H₅, —C(CH₃)₂—C₃H₇, —C(CH₃)₂—CH(CH₃)₂, —C₂H₄—C(CH₃)₃, —CH(CH₃)—C(CH₃)₃, —CH═CH₂, —CH₂—CH═CH₂, —C(CH₃)═CH₂, —CH═CH—CH₃, —C₂H₄—CH═CH₂, —C₇H₁₅, —C₈H₁₇, —CH₂—CH═CH—CH₃, —CH═CH—C₂H₅, —CH₂—C(CH₃)═CH₂, —CH(CH₃)—CH═CH, —CH═C(CH₃)₂, —C(CH₃)═CH—CH₃, —CH═CH—CH═CH₂, —C₃H₆—CH═CH₂, —C₂H₄—CH═CH—CH₃, —CH₂—CH═CH—C₂H₅, —CH═CH—C₃H₇, —CH₂—CH═CH—CH═CH₂, —CH═CH—CH═CH—CH₃, —CH₂NH₂, —CH₂OH, —CH₂SH, —CH₂—CH₂NH₂, —CH₂—CH₂SH, —C₆H₄—OCH₃, —C₆H₄—OH, —CH₂—CH₂—OCH₃, —CH₂—CH₂OH, —CH₂—OCH₃, —CH₂—C₆H₄—OCH₃ or —CH₂—C₆H₄—OH.

[0066] More preferably, the invention is directed to a method of preparing a primary amine compound of general formula (IB), wherein amine compound of general formula (IB) is an amino acid or amide, i.e. R¹ represents —COOR⁵, —CONHR⁵ or —CONR⁵R⁶. Thus, in one embodiment of the present invention, the method of preparing an amine compound of general formula (IB) comprises
[0067] A1) Providing an imine compound of general formula (IIA); and
[0068] B1) Reacting imine compound of general formula (IIA) with a polypeptide having the enzymatic activity of an imine reductase in the presence of a cofactor, to afford primary amine of general formula (IB),
   wherein the polypeptide comprises a conserved amino acid sequence as set forth in SEQ ID NO: 610; and
   wherein R¹ represents —COOR⁵, —CONHR⁵ or —CONR⁵R⁶, with R⁵ and R⁶ being independently of each other with represented by —H, cyclo-C₃H₅, cyclo-C₄H₇, cyclo-C₅H₉, cyclo-C₆H₁₁, cyclo-C₇H₁₃, cyclo-C₈H₁₅, -Ph, —CH₂-Ph, —CPh₃, —CH₃, —C₂H₅, —C₃H₇, —CH(CH₃)₂, —C₄H₉, —CH₂—CH(CH₃)₂, —CH(CH₃)—C₂H₅, —C(CH₃)₃, —C₅H₁₁, —CH(CH₃)—C₃H₇, —CH₂—CH(CH₃)—C₂H₅, —CH(CH₃)—CH(CH₃)₂, —C(CH₃)₂—C₂H₅, —CH₂—C(CH₃)₃, —CH(C₂H₅)₂, —C₂H₄—CH(CH₃)₂, —C₆H₁₃, —C₃H₆—CH(CH₃)₂, —C₂H₄—CH(CH₃)—C₂H₅, —CH(CH₃)—C₄H₉, —CH₂—CH(CH₃)—C₃H₇, —CH(CH₃)—CH₂—CH(CH₃)₂, —CH(CH₃)—CH(CH₃)—C₂H₅, —CH₂—CH(CH₃)—CH(CH₃)₂, —CH₂—C(CH₃)₂—C₂H₅, —C(CH₃)₂—C₃H₇, —C(CH₃)₂—CH(CH₃)₂, —C₂H₄—C(CH₃)₃, —CH(CH₃)—C(CH₃)₃, —CH═CH₂, —CH₂—CH═CH₂, —C(CH₃)═CH₂, —CH═CH—CH₃, —C₂H₄—CH═CH₂, —C₇H₁₅, —C₈H₁₇, —CH₂—CH═CH—CH₃, —CH═CH—C₂H₅, —CH₂—C(CH₃)═CH₂, —CH(CH₃)—CH═CH, —CH═C(CH₃)₂, —C(CH₃)═CH—CH₃, —CH═CH—CH═CH₂, —C₃H₆—CH═CH₂, —C₂H₄—CH═CH—CH₃, —CH₂—CH═CH—C₂H₅, —CH═CH—C₃H₇, —CH₂—CH═CH—CH═CH₂, —CH═CH—CH═CH—CH₃, —CH₂NH₂, —CH₂OH, —CH₂SH, —CH₂—CH₂NH₂, —CH₂—CH₂SH, —C₆H₄—OCH₃, —C₆H₄—OH, —CH₂—CH₂—OCH₃, —CH₂—CH₂OH, —CH₂—OCH₃, —CH₂—C₆H₄—OCH₃ or —CH₂—C₆H₄—OH.

[0069] Preferably, the polypeptide comprises a conserved amino acid sequence selected from the sequences as set forth in SEQ ID NO: 611 to 621.

[0070] More preferably, the method is directed to the preparation of a primary amine compound of general formula (IB), comprising
[0071] A1) Providing an imine compound of general formula (IIA); and
[0072] B1) Reacting imine compound of general formula (IIA) with a polypeptide having the enzymatic activity of an imine reductase in the presence of a cofactor, to afford primary amine of general formula (IB),
   wherein the polypeptide comprises a conserved amino acid sequence as set forth in SEQ ID NO: 610; and
   wherein the primary amine compound of general formula (IB) is an amino acid, i.e. R¹ represents —COOR⁵ and R² represents —CH(Y¹)Y², wherein Y¹ and Y² have the meanings as defined herein.

[0073] In a preferred embodiment of the present invention, R¹ represents —COOH and R² is selected from —CH₃, —COH, —CH₂CH₃, —(CH₂)₂CH₃, —(CH₂)₃CH₃, —CH₂COOH, —CH₂CONH₂, —CH₂CH₂OH, —CH₂CH₂SH, —CH(CH₃)COOH, —(CH₂)₂COOH or —(CH₂)₂CONH₂. Thus, the present invention is directed to a method of preparing a primary amine compound of general formula (IB), comprising the steps of:
[0074] A1) Providing an imine compound of general formula (IIA); and
[0075] B1) Reacting imine compound of general formula (IIA) with a polypeptide having the enzymatic activity of an imine reductase in the presence of a cofactor, to afford primary amine of general formula (IB),
   wherein the polypeptide comprises a conserved amino acid sequence as set forth in SEQ ID NO: 610; and
   wherein R¹ represents —COOH and R² is selected from —CH₃, —COOH, —CH₂CH₃, —(CH₂)₂CH₃, —(CH₂)₃CH₃, —CH₂COOH, —CH₂CONH₂, —CH₂CH₂OH, —CH₂CH₂SH, —CH(CH₃)COOH, —(CH₂)₂COOH or —(CH₂)₂CONH₂.

[0076] Preferably, the method of preparing a primary amine compound of general formula (IB) comprises the steps of:
[0077] A1) Providing an imine compound of general formula (IIA); and
[0078] B1) Reacting imine compound of general formula (IIA) with a polypeptide having the enzymatic activity of an imine reductase in the presence of a cofactor, to afford primary amine of general formula (IB),
   wherein the polypeptide comprises a conserved amino acid sequence selected from the sequences as set forth in SEQ ID NO: 611 to 621, wherein R¹ represents —COOH and R² is selected from —CH₃, —COOH, —CH₂CH₃, —(CH₂)₂CH₃, —(CH₂)₃CH₃, —CH₂COOH, —CH₂CONH₂, —CH₂CH₂OH, —CH₂CH₂SH, —CH(CH₃)COOH, —(CH₂)₂COOH or —(CH₂)₂CONH₂.

[0079] Preferably, the method of preparing a primary amine compound of general formula (IB) comprises the steps of:
[0080] A1) Providing an imine compound of general formula (IIA); and
[0081] B1) Reacting imine compound of general formula (IIA) with a polypeptide having the enzymatic activity of an imine reductase in the presence of a cofactor, to afford primary amine of general formula (IB),
   wherein the polypeptide comprises a conserved amino acid sequence as set forth in SEQ ID NO: 611, wherein R¹ represents —COOH and R² is selected from —CH₃, —COOH, —CH₂CH₃, —(CH₂)₂CH₃, —(CH₂)₃CH₃, —CH₂COOH, —CH₂CONH₂, —CH₂CH₂OH, —CH₂CH₂SH, —CH(CH₃)COOH, —(CH₂)₂COOH or —(CH₂)₂CONH₂.

[0082] Preferably, the method of preparing a primary amine compound of general formula (IB) comprises the steps of:
[0083] A1) Providing an imine compound of general formula (IIA); and
[0084] B1) Reacting imine compound of general formula (IIA) with a polypeptide having the enzymatic activity of an imine reductase in the presence of a cofactor, to afford primary amine of general formula (IB),
   wherein the polypeptide comprises the conserved amino acid sequence as set forth in SEQ ID NO: 617, wherein R¹ represents —COOH and R² is selected from —CH₃, —COOH, —CH₂CH₃, —(CH₂)₂CH₃, —(CH₂)₃CH₃, —CH₂COOH, —CH₂CONH₂, —CH₂CH₂OH, —CH₂CH₂SH, —CH(CH₃)COOH, —(CH₂)₂COOH or —(CH₂)₂CONH₂.

[0085] Preferably, the method of preparing a primary amine compound of general formula (IB) comprises the steps of:
[0086] A1) Providing an imine compound of general formula (IIA); and
[0087] B1) Reacting imine compound of general formula (IIA) with a polypeptide having the enzymatic activity of an imine reductase in the presence of a cofactor, to afford primary amine of general formula (IB),
   wherein the polypeptide comprises the conserved amino acid sequence as set forth in SEQ ID NO: 618, wherein R¹ represents —COOH and R² is selected from —CH₃, —COOH, —CH₂CH₃, —(CH₂)₂CH₃, —(CH₂)₃CH₃, —CH₂COOH, —CH₂CONH₂, —CH₂CH₂OH, —CH₂CH₂SH, —CH(CH₃)COOH, —(CH₂)₂COOH or —(CH₂)₂CONH₂.

[0088] Preferably, the method of preparing a primary amine compound of general formula (IB) comprises the steps of:
[0089] A1) Providing an imine compound of general formula (IIA); and
[0090] B1) Reacting imine compound of general formula (IIA) with a polypeptide having the enzymatic activity of an imine reductase in the presence of a cofactor, to afford primary amine of general formula (IB),
   wherein the polypeptide comprises the conserved amino acid sequence as set forth in SEQ ID NO: 619, wherein R¹ represents —COOH and R² is selected from —CH₃, —COOH, —CH₂CH₃, —(CH₂)₂CH₃, —(CH₂)₃CH₃, —CH₂COOH, —CH₂CONH₂, —CH₂CH₂OH, —CH₂CH₂SH, —CH(CH₃)COOH, —(CH₂)₂COOH or —(CH₂)₂CONH₂.

[0091] Preferably, the method of preparing a primary amine compound of general formula (IB) comprises the steps of:
[0092] A1) Providing an imine compound of general formula (IIA); and
[0093] B1) Reacting imine compound of general formula (IIA) with a polypeptide having the enzymatic activity of an imine reductase in the presence of a cofactor, to afford primary amine of general formula (IB),
   wherein the polypeptide comprises the conserved amino acid sequence as set forth in SEQ ID NO: 620, wherein R¹ represents —COOH and R² is selected from —CH₃, —COOH, —CH₂CH₃, —(CH₂)₂CH₃, —(CH₂)₃CH₃, —CH₂COOH, —CH₂CONH₂, —CH₂CH₂OH, —CH₂CH₂SH, —CH(CH₃)COOH, —(CH₂)₂COOH or —(CH₂)₂CONH₂.

[0094] Preferably, the method of preparing a primary amine compound of general formula (IB) comprises the steps of:
[0095] A1) Providing an imine compound of general formula (IIA); and
[0096] B1) Reacting imine compound of general formula (IIA) with a polypeptide having the enzymatic activity of an imine reductase in the presence of a cofactor, to afford primary amine of general formula (IB),
   wherein the polypeptide comprises the conserved amino acid sequence as set forth in SEQ ID NO: 621, wherein R¹ represents —COOH and R² is selected from —CH₃, —COOH, —CH₂CH₃, —(CH₂)₂CH₃, —(CH₂)₃CH₃, —CH₂COOH, —CH₂CONH₂, —CH₂CH₂OH, —CH₂CH₂SH, —CH(CH₃)COOH, —(CH₂)₂COOH or —(CH₂)₂CONH₂.

[0097] In one embodiment of the present invention, the imine compound of general formula (IIA) is a 2-imino carboxylic acid, preferably a substituted 2-iminopropionate, or substituted 2-iminobutyrate. Preferably, the 2-imino carboxylic acid is selected from the group comprising or consisting of: 2-iminopropionate, 2-iminobutyrate, 2-iminovalerate, 2-iminoglutarate, 2-iminomalonate, 2-imino-4-mercaptobutyrate, 2-imino-3-methylsuccinate, and 2-iminoglutarate or substituted derivatives thereof.

[0098] Thus, the present invention is directed to a method of preparing a primary 2-amino carboxylic acid, comprising the steps of:
[0099] A1) Providing a 2-imino carboxylic acid; and
[0100] B1) Reacting the 2-imino carboxylic acid with a polypeptide having the enzymatic activity of an imine reductase in the presence of a cofactor, to afford a primary 2-amino carboxylic acid,
   wherein the polypeptide comprises a conserved amino acid sequence as set forth in SEQ ID NO: 610; and
   wherein the 2-imino carboxylic acid is selected from the group comprising or consisting of: 2-iminopropionate, 2-iminobutyrate, 2-iminovalerate, 2-iminoglutarate, 2-iminomalonate, 2-imino-4-mercaptobutyrate, 2-imino-3-methylsuccinate, and 2-iminoglutarate or substituted derivatives thereof.

[0101] In one embodiment of the present invention the method of preparing a primary amine compound of general formula (IB) comprises the steps of:
[0102] A1) Providing an imine compound of general formula (IIA); and
[0103] B1) Reacting imine compound of general formula (IIA) with a polypeptide having the enzymatic activity of an imine reductase in the presence of a cofactor, to afford primary amine of general formula (IB),
   wherein the polypeptide comprises a conserved amino acid sequence as set forth in SEQ ID NO: 610, R¹ represents —CH₃, —COOR⁵, —COSR⁵, —CSSR⁵, —CONHR⁵, —CONR⁵R⁶, —CH═CH—COOR⁵, —CH═CH—COSR⁵, —CH═CH—CSSR⁵, —CH═CH—CONHR⁵, —CH═CH—CONR⁵R⁶, —C≡C—COOR⁵, —C≡C—COSR⁵, —C≡C—CSSR⁵, —C≡C—CONHR⁵ or —C≡C—CONR⁵R⁶; with R⁵ and R⁶ having the meanings as defined above;
   R² represents —CHZ¹Z², and wherein Z¹ represents —H or —CH₃ and Z² represents —H, —CH₃, —CH₂CH₃, —(CH₂)₂CH₃, —COOH, —CONH₂, —CH₂OH, —CH₂SH, —CH₂COOH or —CH₂CONH₂

[0104] Preferably, the polypeptide comprises a conserved amino acid sequence selected from the sequences as set forth in SEQ ID NO: 611 to 621.

[0105] In one embodiment of the present invention the method of preparing a primary amine compound of general formula (IB) comprises the steps of:
[0106] A1) Providing an imine compound of general formula (IIA); and
[0107] B1) Reacting imine compound of general formula (IIA) with a polypeptide having the enzymatic activity of an imine reductase in the presence of a cofactor, to afford primary amine of general formula (IB),
   wherein the polypeptide comprises a conserved amino acid sequence as set forth in SEQ ID NO: 610, R¹ represents —COOH, R² represents —CHZ¹Z², and wherein Z¹ represents —H or —CH₃ and Z² represents —H, —CH₃, —CH₂CH₃, —(CH₂)₂CH₃, —COOH, —CONH₂, —CH₂OH, —CH₂SH, —CH₂COOH or —CH₂CONH₂.

[0108] In one embodiment of the present invention the method of preparing a primary amine compound of general formula (IB) comprises the steps of:
[0109] A1) Providing an imine compound of general formula (IIA); and
[0110] B1) Reacting imine compound of general formula (IIA) with a polypeptide having the enzymatic activity of an imine reductase in the presence of a cofactor, to afford primary amine of general formula (IB),
   wherein the polypeptide comprises a conserved amino acid sequence as set forth in SEQ ID NO: 610, R¹ represents —COOH and R² represents —CH₂COOH.

[0111] Preferably, the polypeptide comprises a conserved amino acid sequence selected from the sequences as set forth in SEQ ID NO: 611 to 621. More preferably, the polypeptide comprises a conserved amino acid sequence as set forth in SEQ ID NO 611. More preferably, the polypeptide comprises a conserved amino acid sequence as set forth in SEQ ID NO 617. More preferably, the polypeptide comprises a conserved amino acid sequence as set forth in SEQ ID NO 618. More preferably, the polypeptide comprises a conserved amino acid sequence as set forth in SEQ ID NO 619. More preferably, the polypeptide comprises a conserved amino acid sequence as set forth in SEQ ID NO 620. More preferably, the polypeptide comprises a conserved amino acid sequence as set forth in SEQ ID NO 621.

[0112] Further preferred is a method of preparing a primary amine compound of general formula (IC), i.e. R¹ represents —COOH and R² represents —CHZ¹Z²

[chemical structure]

wherein Z¹ represents —H or —CH₃ and Z² represents —H, —CH₃, —CH₂CH₃, —(CH₂)₂CH₃, —COOH, —CONH₂, —CH₂OH, —CH₂SH, —CH₂COOH or —CH₂CONH₂,
comprising the steps of:
[0113] A1) Providing an imine compound of general formula (IIC)

[chemical structure]

[0114] wherein R¹ represents —COOH and Z¹ and Z² have the meanings as defined above; and
[0115] B1) Reacting imine compound of general formula (IIC) with a polypeptide having the enzymatic activity of an imine reductase in the presence of a cofactor, to afford primary amine of general formula (IC),
   wherein the polypeptide comprises a conserved amino acid sequence as set forth in SEQ ID NO: 610.

[0116] Preferably, the polypeptide comprises a conserved amino acid sequence selected from the sequences as set forth in SEQ ID NO: 611 to 621.

[0117] Further preferred is a method of preparing a primary amine compound of general formula (IC), i.e. R¹ represents —CH₃, —COOR⁵, —COSR⁵, —CSSR⁵, —CONHR⁵, —CONR⁵R⁶, —CH═CH—COOR⁵, —CH═CH—COSR⁵, —CH═CH—CSSR⁵, —CH═CH—CONHR⁵, —CH═CH—CONR⁵R⁶, —C≡C—COOR⁵, —C≡C—COSR⁵, —C≡C—CSSR⁵, —C≡C—CONHR⁵ or —C≡C—CONR⁵R⁶, with R⁵ and R⁶ having the meanings as defined above, and R² represents —CHZ¹Z²

[chemical structure]

wherein Z¹ represents —H or —CH₃ and Z² represents —H, —CH₃, —CH₂CH₃, —(CH₂)₂CH₃, —COOH, —CONH₂, —CH₂OH, —CH₂SH, —CH₂COOH or —CH₂CONH₂,
comprising the steps of:
[0118] A1) Providing an imine compound of general formula (IIC)

[chemical structure]

[0119] wherein R¹ represents —COOH and Z¹ and Z² have the meanings as defined above; and
[0120] B1) Reacting imine compound of general formula (IIC) with a polypeptide having the enzymatic activity of an imine reductase in the presence of a cofactor, to afford primary amine of general formula (IC),
   wherein the polypeptide comprises a conserved amino acid sequence as set forth in SEQ ID NO: 610.

[0121] Preferably, the polypeptide comprises a conserved amino acid sequence selected from the sequences as set forth in SEQ ID NO: 611 to 621.

[0122] The imine compound of general formula (IIC) of step A1) is preferably provided by reacting amino alcohol compound of general formula (V) with a β-hydroxyaspartate dehydratase

[chemical structure]

wherein R¹ represents —COOH, R²* represents —C(OH)Z¹Z² and Z¹ and Z² have the meanings as defined herein.

[0123] Thus, the present invention is also directed a method of preparing a primary amine compound of general formula (IC), comprising the steps of:
[0124] A1) Providing an imine compound of general formula (IIC) by reacting amino alcohol compound of general formula (V) with a β-hydroxyaspartate dehydratase; and
[0125] B1) Reacting imine compound of general formula (IIC) with a polypeptide having the enzymatic activity of an imine reductase in the presence of a cofactor, to afford primary amine of general formula (IC),
   wherein the polypeptide comprises a conserved amino acid sequence as set forth in SEQ ID NO: 610; and
   wherein R¹ represents —COOH, Z¹ represents —H or —CH₃ and Z² represents —H, —CH₃, —CH₂CH₃, —(CH₂)₂CH₃, —COOH, —CONH₂, —CH₂OH, —CH₂SH, —CH₂COOH or —CH₂CONH₂.

[0126] In other words, the present invention is directed to a method of preparing a primary amine compound of general formula (IC), wherein R¹ represents —COOH, Z¹ represents —H or —CH₃ and Z² represents —H, —CH₃, —CH₂CH₃, —(CH₂)₂CH₃, —COOH, —CONH₂, —CH₂OH, —CH₂SH, —CH₂COOH or —CH₂CONH₂, comprising:

A1″a) Providing an amino alcohol compound of general formula (V),
A1″b) Reacting amino alcohol compound of general formula (V) with a polypeptide having the enzymatic activity of a β-hydroxyaspartate dehydratase, to afford a primary imine compound of general formula (IIC),
and
B1″) Reacting imine compound of general formula (IIC) with a polypeptide having the enzymatic activity of an imine reductase in the presence of a cofactor, to afford a primary amine of general formula (IC),
wherein the polypeptide comprises a conserved amino acid sequence as set forth in SEQ ID NO: 610.

[0127] Preferably, the polypeptide comprises a conserved amino acid sequence selected from the sequences as set forth in SEQ ID NO: 611 to 621. More preferably, the polypeptide comprises a conserved amino acid sequence as set forth in SEQ ID NO 611. More preferably, the polypeptide comprises a conserved amino acid sequence as set forth in SEQ ID NO 617. More preferably, the polypeptide comprises a conserved amino acid sequence as set forth in SEQ ID NO 618. More preferably, the polypeptide comprises a conserved amino acid sequence as set forth in SEQ ID NO 619. More preferably, the polypeptide comprises a conserved amino acid sequence as set forth in SEQ ID NO 620. More preferably, the polypeptide comprises a conserved amino acid sequence as set forth in SEQ ID NO 621.

[0128] Preferably, the method of preparing a primary amine compound of general formula (IC) comprises:

A1″a) Providing an amino alcohol compound of general formula (V),

[chemical structure]

wherein R¹ represents —COOH, R²* represents —C(OH)Z¹Z², Z¹ represents —H or —CH₃ and Z² represents —H, —CH₃, —CH₂CH₃, —(CH₂)₂CH₃, —COOH, —CONH₂, —CH₂OH, —CH₂SH, —CH₂COOH or —CH₂CONH₂;
A1″b) Reacting amino alcohol compound of general formula (V) with a polypeptide having the enzymatic activity of a β-hydroxyaspartate dehydratase, to afford a primary imine compound of general formula (IIC); and
B1″) Reacting imine compound of general formula (IIC) with a polypeptide comprising an amino acid sequence of at least 80% sequence identity to an amino acid sequence selected from SEQ ID Nos: 300-598 and which has the enzymatic activity of an imine reductase in the presence of the cofactor NADH, to afford an amine of general formula (IC).

[0129] Preferably, the method of preparing a primary amine compound of general formula (IC) comprises:

A1″a) Providing an amino alcohol compound of general formula (V),
wherein R¹ represents —COOH, R²* represents —C(OH)Z¹Z², Z¹ represents —H or —CH₃ and Z² represents —H, —CH₃, —CH₂CH₃, —(CH₂)₂CH₃, —COOH, —CONH₂, —CH₂OH, —CH₂SH, —CH₂COOH or —CH₂CONH₂;
A1″b) Reacting amino alcohol compound of general formula (V) with a polypeptide comprising an amino acid sequence of at least 80% sequence identity to SEQ ID NO: 602 having the enzymatic activity of a β-hydroxyaspartate dehydratase, to afford a primary imine compound of general formula (IIC); and
B1″) Reacting imine compound of general formula (IIC) with a polypeptide comprising an amino acid sequence of at least 80% sequence identity to an amino acid sequence selected from SEQ ID Nos: 300-598 and which has the enzymatic activity of an imine reductase in the presence of the cofactor NADH, to afford an amine of general formula (IC).

[0130] Preferably, in the inventive methods described herein, the amino alcohol compound has the general formula (V), wherein R¹ represents —COOH, Z¹ represents —H and Z² represents —CH₂COOH.

[0131] Preferably, in step B1″) of the inventive method, the polypeptide comprises an amino acid sequence selected from SEQ ID NO: 300, 306, 321, 324, 325, 338, 346, 357, 374, 422, 434 and 459 or at least 80% sequence identity of the aforementioned.

[0132] More preferably, in step B1″) of the inventive method, the polypeptide comprises an amino acid sequence as set forth in SEQ ID NO 434 or at least 80% sequence identity of the aforementioned.

### DETAILED DESCRIPTION OF THE INVENTION

### Definitions

[0133] “Iminosuccinate reductase activity” as used herein, refers to an enzymatic activity in which the imine group of iminosuccinate is reduced to a primary amine group and asparte is formed.

[0134] “Iminosuccinate reductase” as used herein refers to a polypeptide having iminosuccinate reductase activity. Iminosuccinate reductase includes but is not limited to enzymes comprising the conserved amino acid sequence of GXKXGX₈GXKXGGX₂PXNX₇NHQSX₃LFX₄GX₈NX₂TAXRTAAX₄SX₃LX₈GX₂GAGXQ X₃QX₁₅WNX₃₉SX₁₅HX₃MGTDTX₂KXEX₁₃DX₃QX₄GEXQX₁₆GX₉RX₆TX₂DGXGX₃QDX A (SEQ ID NO: 610) as well as enzymes from proteobacteria (SEQ ID NO: 300-598), such as Paracoccus denitrificans (SEQ ID NO: 434).

[0135] “Imine reductase activity” as used herein refers to an enzymatic activity in which an imine group of an imine compound is reduced to a primary amine product compound, in the presence of cofactor NADH or NADPH as illustrated in FIG. 2C.

[0136] The newly identified group of enzymes called imine reductases or even more precisely primary imine reductases convert only primary imines to primary amines (as shown in FIG. 2C) but not secondary imines to secondary amines (as shown in FIG. 2B) and are also not able to convert ketones to tertiary amines (as shown in FIG. 2A). As used herein the term imine or primary imine refers to imines having a hydrogen attached to the nitrogen atom and are represented by the general formula

[chemical structure]

while secondary imines do not have a hydrogen atom bound to the nitrogen atom and are represented by the following general formula

[chemical structure]

wherein R is different from hydrogen.

[0137] In the state of the art imine reductases or even more precisely secondary imine reductases are known which catalyze the reduction of secondary imines to the corresponding secondary amines as shown in FIG. 2B, but which do not have primary imine reductase activity as shown in FIG. 2C.

[0138] The newly identified primary imine reductases catalyze the reduction of primary imines to the corresponding primary amines as shown in FIG. 2C, but do not have secondary imine reductase activity as shown in FIG. 2B and do also not catalyze the reductive amination of a carbonyl compound and an amine substrate as illustrated in FIG. 2A.

[0139] Consequently, the term “Imine reductase activity” as used herein refers only to the enzymatic activity of catalyzing the reduction of primary imines to the corresponding primary amines as shown in FIG. 2C, excluding the activity to catalyze the reduction of secondary imines to the corresponding secondary amines as shown in FIG. 2B and excluding the activity to catalyze the reductive amination of a carbonyl compound and an amine substrate as illustrated in FIG. 2A.

[0140] “Imine reductase” as used herein refers to a polypeptide having an imine reductase activity. It is to be understood that imine reductases are not limited to polypeptide variants derived from the naturally occurring imine reductases from various bacteria, such as Paracoccus denitrificans, but may include other enzymes having imine reductase activity, or recombinant variants of the naturally occurring imine reductases, including but not limiting enzymes comprising the conserved amino acid sequence of GXKXGX₈GXKXGGX₂PXNX₇NHQSX₃LFX₄GX₈NX₂TAXRTAAX₄SX₃LX₈GX₂GAGXQ X₃QX₁₅WNX₃₉SX₁₅HX₃MGTDTX₂KXEX₁₃DX₃QX₄GEXQX₁₆GX₉RX₆TX₂DGXGX₃QDX A (SEQ ID NO: 610), as well as enzymes from proteobacteria (SEQ ID NO: 300-598), such as Paracoccus denitrificans (SEQ ID NO: 434). Accordingly, a polypeptide having iminosuccinate reductase activity is also a polypeptide having imine reductase activity.

[0141] Thus, within this conserved amino acid sequence of 251 amino acids, each X represents independently of each other exactly one amino acid and preferably one proteinogenic amino acids and more preferably exactly one canonic amino acid.

[0142] As used herein, “β-hydroxyaspartate dehydratase” refers to a polypeptide having a β-hydroxyaspartate dehydratase activity, i.e. a polypeptide that catalyzes the reaction of β-hydroxyaspartate and derivatives thereof to iminosuccinate and the corresponding derivatives thereof. The β-hydroxyaspartate dehydratase belongs to the EC class 4.3.1.20.

[0143] “Percentage of sequence identity” and “percentage homology” are used interchangeably herein to refer to comparisons among nucleic acids and polypeptides, and are determined by comparing two optimally aligned sequences over a comparison window, wherein the portion of the nucleic acids or polypeptide sequence in the comparison window may comprise additions or deletions (i.e. gaps) as compared to the reference sequence for optimal alignment of the two sequences. The percentage may be calculated by determining the number of positions at which the identical nucleic acid base or amino acid residue occurs in both sequences to yield the number of matched positions, dividing the number of matched positions by the total number of positions in the window of comparison and multiplying the result by 100 to yield the percentage of sequence identity. Alternatively, the percentage may be calculated by determining the number of positions at which either the identical nucleic acid base or amino acid residue occurs in both sequences or a nucleic acid base or amino acid residue is aligned with a gap to yield the number of matched positions, dividing the number of matched positions by the total number of positions in the window of comparison and multiplying the result by 100 to yield the percentage of sequence identity. Those of skill in the art appreciate that there are many established algorithms available to align two sequences.

[0144] “Reference sequence” refers to a defined sequence used as a basis for a sequence comparison. A reference sequence may be a subset of a larger sequence, for example, a segment of a full-length gene or polypeptide sequence. Generally, a reference sequence is at least 20 nucleotide or amino acid residues in length, at least 25 residues in length, at least 50 residues in length, or the full length of the nucleic acid or polypeptide. Since two nucleic acids or polypeptides may each (1) comprise a sequence (i.e., a portion of the complete sequence) that is similar between the two sequences, and (2) may further comprise a sequence that is divergent between the two sequences, sequence comparisons between two (or more) nucleic acids or polypeptide are typically performed by comparing sequences of the two nucleic acids or polypeptides over a “comparison window” to identify and compare local regions of sequence similarity. In some embodiments, a “reference sequence” can be based on a primary amino acid sequence, where the reference sequence is a sequence that can have one or more changes in the primary sequence.

[0145] “Substantial identity” refers to a nucleic acid or polypeptide sequence that has at least 80 percent sequence identity, at least 85 percent identity and 89 to 95 percent sequence identity, more usually at least 99 percent sequence identity as compared to a reference sequence over a comparison window of at least 20 residue positions, frequently over a window of at least 30-50 residues, wherein the percentage of sequence identity is calculated by comparing the reference sequence to a sequence that includes deletions or additions which total 20 percent or less of the reference sequence over the window of comparison. In specific embodiments applied to polypeptides, the term “substantial identity” means that two polypeptide sequences, when optimally aligned, share at least 80 percent sequence identity, preferably at least 89 percent sequence identity, at least 95 percent sequence identity or more (e.g., 99 percent sequence identity). Preferably, residue positions which are not identical differ by conservative amino acid substitutions.

[0146] “Deletion” refers to modification to the polypeptide by removal of one or more amino acids from the reference polypeptide. Deletions can comprise removal of 1 or more amino acids, 2 or more amino acids, 5 or more amino acids, 10 or more amino acids, 15 or more amino acids, or 20 or more amino acids, up to 10% of the total number of amino acids, or up to 20% of the total number of amino acids making up the reference enzyme while retaining enzymatic activity and/or retaining the improved properties of an engineered imine reductase enzyme. Deletions can be directed to the internal portions and/or terminal portions of the polypeptide. In various embodiments, the deletion can comprise a continuous segment or can be discontinuous.

[0147] “Insertion” refers to modification to the polypeptide by addition of one or more amino acids from the reference polypeptide. In some embodiments, the improved engineered imine reductase enzymes comprise insertions of one or more amino acids to the naturally occurring polypeptide having imine reductase activity as well as insertions of one or more amino acids to other improved imine reductase polypeptides. Insertions can be in the internal portions of the polypeptide, or to the carboxy or amino terminus. Insertions as used herein include fusion proteins as is known in the art. The insertion can be a contiguous segment of amino acids or separated by one or more of the amino acids in the naturally occurring polypeptide.

[0148] “Isolated polypeptide” refers to a polypeptide which is substantially separated from other contaminants that naturally accompany it, e.g., protein, lipids, and nucleic acids. The term embraces polypeptides which have been removed or purified from their naturally-occurring environment or expression system (e.g., host cell or in vitro synthesis). The imine reductase enzymes may be present within a cell, present in the cellular medium, or prepared in various forms, such as lysates or isolated preparations. As such, in some embodiments, the polypeptide having the enzymatic activity of an imine reductase enzyme can be an isolated polypeptide.

[0149] “Improved enzyme property” refers to a polypeptide having the enzymatic activity of an imine reductase that exhibits an improvement in any enzyme property as compared to a reference imine reductase. For the polypeptides having the enzymatic activity of an imine reductase described herein, the comparison is generally made to the wild-type enzyme from which the imine reductase is derived, although in some embodiments, the reference enzyme can be another improved engineered imine reductase. Enzyme properties for which improvement is desirable include, but are not limited to, enzymatic activity (which can be expressed in terms of percent conversion of the substrate), thermo stability, solvent stability, pH activity profile, cofactor requirements, refractoriness to inhibitors (e.g., substrate or product inhibition), stereospecificity, and stereoselectivity (including enantioselectivity).

[0150] “Increased enzymatic activity” refers to an improved property of the polypeptides having the enzymatic activity of an imine reductase, which can be represented by an increase in specific activity (e.g., product produced/time/weight protein) or an increase in percent conversion of the substrate to the product (e.g., percent conversion of starting amount of substrate to product in a specified time period using a specified amount of imine reductase) as compared to the reference imine reductase enzyme. Any property relating to enzyme activity may be affected, including the classical enzyme properties of Kₘ, Vₘₐₓ or k_{cat}, changes of which can lead to increased enzymatic activity. Improvements in enzyme activity can be from about 1.2 times the enzymatic activity of the corresponding wild-type enzyme, to as much as 2 times, 5 times, 10 times, 20 times, 25 times, 50 times or more enzymatic activity than the naturally occurring or another engineered imine reductase from which the imine reductase polypeptides were derived. Imine reductase activity can be measured by any one of standard assays, such as by monitoring changes in properties of substrates, cofactors, or products. In some embodiments, the amount of products generated can be measured by Liquid Chromatography-Mass Spectrometry (LC-MS). Comparisons of enzyme activities are made using a defined preparation of enzyme, a defined assay under a set condition, and one or more defined substrates, as further described in detail herein. Generally, when lysates are compared, the numbers of cells and the amount of protein assayed are determined as well as use of identical expression systems and identical host cells to minimize variations in amount of enzyme produced by the host cells and present in the lysates.

[0151] “Suitable reaction conditions” refer to those conditions in the biocatalytic reaction solution (e.g., ranges of enzyme loading, substrate loading, cofactor loading, temperature, pH, buffers, co-solvents, etc.) under which a polypeptide having imine reductase activity of the present invention is capable of converting a substrate compound to a product compound (e.g. conversion of compound of formula (IIA) to a compound of formula (IB). Exemplary “suitable reaction conditions” are provided in the present disclosure and illustrated by the Examples.

[0152] “Cofactor regeneration system” or “cofactor recycling system” refers to a set of reactants that participate in a reaction that reduces the oxidized form of the cofactor (e.g., NADP⁺ to NADPH). Cofactors oxidized by the imine reductase catalyzed reductive amination of a ketone substrate are regenerated in reduced form by the cofactor regeneration system. Cofactor regeneration systems comprise a stoichiometric reductant that is a source of reducing hydrogen equivalents and is capable of reducing the oxidized form of the cofactor. The cofactor regeneration system may further comprise a catalyst, for example an enzyme catalyst that catalyzes the reduction of the oxidized form of the cofactor by the reductant. Cofactor regeneration systems to regenerate NADH from NAD⁺ or NADPH from NADP⁺, respectively, are known in the art and may be used in the methods described herein.

[0153] “Formate dehydrogenase” and “FDH” are used interchangeably herein to refer to an NAD⁺ or NADP⁺-dependent enzyme that catalyzes the conversion of formate and NAD⁺ or NADP⁺ to carbon dioxide and NADH or NADPH, respectively.

[0154] “Alkyl” refers to saturated hydrocarbon groups of from 1 to 18 carbon atoms, either straight chained or branched, more preferably from 1 to 8 carbon atoms, and most preferably 1 to 6 carbon atoms. An alkyl with a specified number of carbon atoms is denoted as C₁-C₈ alkyl and refers to a linear C₁-C₈ alkyl of —CH₃, —C₂H₅, —C₃H₇, —C₄H₉, —C₅H₁₁, —C₆H₁₃, —C₇H₁₅, —C₈H₁₇, —CH₂-Ph, —CH₂—CH₂-Ph or a branched C₁-C₈ alkyl or preferably branched C₃-C₈ alkyl of —CH(CH₃)₂, —CH₂—CH(CH₃)₂, —CH(CH₃)—C₂H₅, —C(CH₃)₃, —CH(CH₃)—C₃H₇, —CH₂—CH(CH₃)—C₂H₅, —CH(CH₃)—CH(CH₃)₂, —C(CH₃)₂—C₂H₅, —CH₂—C(CH₃)₃, —CH(C₂H₅)₂, —C₂H₄—CH(CH₃)₂, —C₃H₆—CH(CH₃)₂, —C₂H₄—CH(CH₃)—C₂H₅, —CH(CH₃)—C₄H₉, —CH₂—CH(CH₃)—C₃H₇, —CH(CH₃)—CH₂—CH(CH₃)₂, —CH(CH₃)—CH(CH₃)—C₂H₅, —CH₂—CH(CH₃)—CH(CH₃)₂, —CH₂—C(CH₃)₂—C₂H₅, —C(CH₃)₂—C₃H₇, —C(CH₃)₂—CH(CH₃)₂, —C₂H₄—C(CH₃)₃, —CH(CH₃)—C(CH₃)₃, —C₄H₈—CH(CH₃)₂, —C₃H₆—CH(CH₃)—C₂H₅, —C₃H₆—CH(CH₃)—C₂H₅, —C₂H₄—CH(CH₃)—C₃H₇, —CH₂—CH(CH₃)—C₄H₉, —CH(CH₃)—C₅H₁₁, —CH(C₂H₅)—C₄H₉, —C₂H₄—CH(CH₃)—C₃H₇, —CH₂—CH(C₂H₅)—C₃H₇, —CH₂—CH(CH₃)—C₄H₉, —CH₂—CH(CH₃)—CH₂—CH(CH₃)₂, —CH(C₂H₅)—CH₂—CH(CH₃)₂, —CH(CH₃)—C₂H₄—CH(CH₃)₂, —CH(CH₃)—CH₂—CH(CH₃)—C₂H₅, —CH₂—CH(CH₃)—CH(CH₃)—C₂H₅, —CH(CH₃)—CH₂—CH(CH₃)—C₂H₅, —CH(CH₃)—CH(C₂H₅)—C₂H₅, —CH(C₂H₅)—CH(CH₃)—C₂H₅, —CH(CH₃)—CH(CH₃)—C₃H₇, —C₂H₄—CH(CH₃)—CH(CH₃)₂, —CH₂—CH(C₂H₅)—CH(CH₃)₂, —CH₂—CH(CH₃)—CH₂—CH(CH₃)₂, —CH₂—CH(CH₃)—CH(CH₃)—C₂H₅, —C₂H₄—C(CH₃)₂—C₂H₅, —CH₂—C(CH₃)(C₂H₅)₂, —CH₂—C(CH₃)₂—C₃H₇, —CH₂—C(CH₃)₂—C₃H₇, —C(CH₃)(C₂H₅)—C₃H₇, —C(CH₃)₂—C₄H₉, —CH₂—C(CH₃)₂—CH(CH₃)₂, —C(CH₃)(C₂H₅)—CH(CH₃)₂, —C(CH₃)₂—CH₂—CH(CH₃)₂, —C(CH₃)₂—C(CH₃)₃, —C(CH₃)₂—CH(CH₃)—C₂H₅, —C₃H₆—C(CH₃)₃, —C₂H₄—C(CH₃)₂—C₂H₅, —CH₂—CH(CH₃)—C(CH₃)₃, —CH(C₂H₅)—C(CH₃)₃, —CH(CH₃)—CH₂—C(CH₃)₃, —CH(CH₃)—C(CH₃)₂—C₂H₅, —C₅H₁₀—CH(CH₃)₂, —C₄H₈—C(CH₃)₃, —C₄H₈—CH(CH₃)—C₂H₅, —C₄H₈—CH(CH₃)—C₂H₅, —C₃H₆—C(CH₃)₂—C₂H₅, —C₃H₆—CH(C₂H₅)—C₂H₅, —C₃H₆—CH(CH₃)—C₃H₇, —C₂H₄—C(CH₃)₂—C₃H₇, —C₂H₄—CH(C₂H₅)—C₃H₇, —C₂H₄—CH(CH₃)—C₄H₉, —CH₂—C(CH₃)₂—C₄H₉, —CH₂—CH(C₂H₅)—C₄H₉, —CH₂—CH(CH₃)—C₅H₁₁, —C(CH₃)₂—C₅H₁₁, —CH(CH₃)—C₆H₁₃, —CH(C₃H₇)—C₄H₉, —CH(C₂H₅)—C₅H₁₁, —CH₂—C(CH₃)(C₂H₅)—C₃H₇, —C₂H₄—CH(CH₃)—CH₂—CH(CH₃)₂, —CH₂—C(CH₃)₂—CH₂—CH(CH₃)₂, —CH₂—CH(C₂H₅)—CH₂—CH(CH₃)₂, —CH₂—CH(CH₃)—C₂H₄—CH(CH₃)₂, —CH₂—CH(CH₃)—CH₂—C(CH₃)₃, —CH₂—CH(CH₃)—CH₂—CH(CH₃)—C₂H₅, —C(CH₃)(C₂H₅)—CH₂—CH(CH₃)₂, —CH(C₃H₇)—CH₂—CH(CH₃)₂, —CH(C₂H₅)—C₂H₄—CH(CH₃)₂, —CH(C₂H₅)—CH₂—C(CH₃)₃, —CH(C₂H₅)—CH₂—CH(CH₃)—C₂H₅, —CH₂—CH(CH₃)—C₂H₄—CH(CH₃)₂, —C(CH₃)₂—C₂H₄—CH(CH₃)₂, —CH(C₂H₅)—C₂H₄—CH(CH₃)₂, —CH(CH₃)—C₃H₆—CH(CH₃)₂, —CH(CH₃)—C₂H₄—C(CH₃)₃, —CH(CH₃)—C₂H₄—CH(CH₃)—C₂H₅, —CH₂—CH(CH₃)—CH₂—CH(CH₃)—C₂H₅, —C(CH₃)₂—CH₂—CH(CH₃)—C₂H₅, —CH(CH₃)—C₂H₄—CH(CH₃)—C₂H₅, —CH(CH₃)—CH₂—C(CH₃)₂—C₂H₅, —CH(CH₃)—CH₂—CH(CH₃)—C₃H₇, —C₂H₄—CH(CH₃)—CH(CH₃)—C₂H₅, —CH₂—C(CH₃)₂—CH(CH₃)—C₂H₅, —CH₂—CH(C₂H₅)—CH(CH₃)—C₂H₅, —CH₂—CH(CH₃)—CH₂—CH(CH₃)—C₂H₅, —CH₂—CH(CH₃)—C(CH₃)₂—C₂H₅, —CH₂—CH(CH₃)—CH(C₂H₅)₂, —C₃H₆—CH(CH₃)—CH(CH₃)₂, —C₂H₄—C(CH₃)₂—CH(CH₃)₂, —C₂H₄—CH(C₂H₅)—CH(CH₃)₂, —C₂H₄—CH(CH₃)—C(CH₃)₃, —C₂H₄—CH(CH₃)—CH(CH₃)—C₂H₅, —C₃H₆—C(CH₃)₂—C₂H₅, —C₂H₄—C(CH₃)₂—C₃H₇, —CH₂—C(CH₃)(C₂H₅)₂, —C₂H₄—C(C₂H₅)₃, —C₂H₄—C(CH₃)₂—C₃H₇, —CH₂—C(CH₃)₂—C₄H₉, —C(C₂H₅)₂—C₃H₇, —C(CH₃)(C₃H₇)—C₃H₇, —C(CH₃)(C₂H₅)—C₄H₉, —C(CH₃)(—C₂H₅)—C₄H₉, —C(CH₃)₂—C₅H₁₁, —C₂H₄—C(CH₃)₂—CH(CH₃)₂, —CH₂—C(CH₃)₂—C(CH₃)₃, —C(C₂H₅)₂—CH(CH₃)₂, —C(CH₃)(C₃H₇)—CH(CH₃)₂, —C(CH₃)(C₂H₅)—C(CH₃)₃, —CH₂—C(CH₃)₂—CH₂—CH(CH₃)₂, —C(CH₃)₂—C₂H₄—CH(CH₃)₂, —C(CH₃)₂—CH₂—C(CH₃)₃, —CH₂—C(CH₃)₂—C(CH₃)₃, —C₄H₈—C(CH₃)₃, —C₃H₆—C(CH₃)₂—C₂H₅, —C₂H₄—C(CH₃)₂—C₃H₇, —C₂H₄—CH(CH₃)—C(CH₃)₃, —CH₂—C(CH₃)₂—C(CH₃)₃.

[0155] “Alkylene” refers to a straight or branched chain divalent hydrocarbon radical having from 1 to 18 carbon atoms, more preferably from 1 to 8 carbon atoms, and most preferably 1 to 6 carbon atoms.

[0156] “Alkenyl” refers to groups of from 2 to 12 carbon atoms, preferably 2 to 8 carbon atoms (C₂-C₈ alkenyl), either straight or branched containing at least one double bond but optionally containing more than one double bond. As used herein, the term “linear or branched C₂-C₈ alkenyl” refers to —CH═CH₂, —CH₂—CH═CH₂, —C(CH₃)═CH₂, —CH═CH—CH₃, —C₂H₄—CH═CH₂, —CH═CH—C₂H₅, —CH₂—C(CH₃)═CH₂, —CH(CH₃)—CH═CH, —CH═C(CH₃)₂, —C(CH₃)═CH—CH₃, —CH═CH—CH═CH₂, —C₃H₆—CH═CH₂, —C₂H₄—CH═CH—CH₃, —CH₂—CH═CH—C₂H₅, —CH═CH—C₃H₇, —CH₂—CH═CH—CH═CH₂, —CH═CH—CH═CH—CH₃, —CH═CH—CH₂—CH═CH₂, —C(CH₃)═CH—CH═CH₂, —CH═C(CH₃)—CH═CH₂, —CH═CH—C(CH₃)═CH₂, —C₂H₄—C(CH₃)═CH₂, —CH₂—CH(CH₃)—CH═CH₂, —CH(CH₃)—CH₂—CH═CH₂, —CH₂—CH═C(CH₃)₂, —CH₂—C(CH₃)═CH—CH₃, —CH(CH₃)—CH═CH—CH₃, —CH═CH—CH(CH₃)₂, —CH═C(CH₃)—C₂H₅, —C(CH₃)═CH—C₂H₅, —C(CH₃)═C(CH₃)₂, —C(CH₃)₂—CH═CH₂, —CH(CH₃)—C(CH₃)═CH₂, —C(CH₃)═CH—CH═CH₂, —CH═C(CH₃)—CH═CH₂, —CH═CH—C(CH₃)═CH₂, —C₄H₈—CH═CH₂, —C₃H₆—CH═CH—CH₃, —C₂H₄—CH═CH—C₂H₅, —CH₂—CH═CH—C₃H₇, —CH═CH—C₄H₉, —C₃H₆—C(CH₃)═CH₂, —C₂H₄—CH(CH₃)—CH═CH₂, —CH₂—CH(CH₃)—CH₂—CH═CH₂, —CH₂—CH═CH—CH₃, —CH(CH₃)—C₂H₄—CH═CH₂, —C₂H₄—CH═C(CH₃)₂, —C₂H₄—C(CH₃)═CH—CH₃, —CH₂—CH(CH₃)—CH═CH—CH₃, —CH(CH₃)—CH₂—CH═CH—CH₃, —C(C₄H₉)═CH₂, —CH₂—CH═CH—CH(CH₃)₂, —CH₂—CH═C(CH₃)—C₂H₅, —CH₂—C(CH₃)═CH—C₂H₅, —CH(CH₃)—CH═CH—C₂H₅, —CH═CH—CH₂—CH(CH₃)₂, —CH═CH—CH(CH₃)—C₂H₅, —CH═C(CH₃)—C₃H₇, —C(CH₃)═CH—C₃H₇, —CH₂—CH(CH₃)—C(CH₃)═CH₂, —CH(CH₃)—CH₂—C(CH₃)═CH₂, —CH(CH₃)—CH(CH₃)—CH═CH₂, —CH₂—C(CH₃)₂—CH═CH₂, —C(CH₃)₂—CH₂—CH═CH₂, —CH₂—C(CH₃)═C(CH₃)₂, —CH(CH₃)—CH═C(CH₃)₂, —C(CH₃)₂—CH═CH—CH₃, —CH(CH₃)—C(CH₃)═CH—CH₃, —CH═C(CH₃)—CH(CH₃)₂, —C(CH₃)═CH—CH(CH₃)₂, —C(CH₃)═C(CH₃)—C₂H₅, —CH═CH—C(CH₃)₃, —C(CH₃)₂—C(CH₃)═CH₂, —CH(C₂H₅)—C(CH₃)═CH₂, —C(CH₃)(C₂H₅)—CH═CH₂, —CH(CH₃)—C(C₂H₅)═CH₂, —CH₂—C(C₃H₇)═CH₂, —CH₂—C(C₂H₅)═CH—CH₃, —CH(C₂H₅)—CH═CH—CH₃, —C(C₃H₇)═CH—CH₃, —C(C₂H₅)═CH—C₂H₅, —C(C₂H₅)═C(CH₃)₂, —C[C(CH₃)₃]═CH₂, —C[CH(CH₃)(C₂H₅)]═CH₂, —C[CH₂—CH(CH₃)₂]═CH₂, —C₂H₄—CH═CH—CH═CH₂, —CH₂—CH═CH—CH₂—CH═CH₂, —CH═CH—C₂H₄—CH═CH₂, —CH₂—CH═CH—CH═CH—CH₃, —CH═CH—CH₂—CH═CH—CH₃, —CH═CH—CH═CH—C₂H₅, —CH₂—CH═CH—C(CH₃)═CH₂, —CH₂—CH═C(CH₃)—CH═CH₂, —CH₂—C(CH₃)═CH—CH═CH₂, —CH(CH₃)—CH═CH—CH═CH₂, —CH═CH—CH₂—C(CH₃)═CH₂, —CH═CH—CH(CH₃)—CH═CH₂, —CH═C(CH₃)—CH₂—CH═CH₂, —C(CH₃)═CH—CH₂—CH═CH₂, —CH═CH—CH═C(CH₃)₂, —CH═CH—C(CH₃)═CH—CH₃, —CH═C(CH₃)—CH═CH—CH₃, —C(CH₃)═CH—CH═CH—CH₃, —CH═C(CH₃)—C(CH₃)═CH₂, —C(CH₃)═CH—C(CH₃)═CH₂, —C(CH₃)═C(CH₃)—CH═CH₂, —CH═CH—CH═CH—CH═CH₂, —C₅H₁₀—CH═CH₂, —C₄H₈—CH═CH—CH₃, —C₃H₆—CH═CH—C₂H₅, —C₂H₄—CH═CH—C₃H₇, —CH₂—CH═CH—C₄H₉, —C₄H₈—C(CH₃)═CH₂, —C₃H₆—CH(CH₃)—CH═CH₂, —C₂H₄—CH(CH₃)—CH₂—CH═CH₂, —CH₂—CH(CH₃)—C₂H₄—CH═CH₂, —C₃H₆—CH═C(CH₃)₂, —C₃H₆—C(CH₃)═CH—CH₃, —C₂H₄—CH(CH₃)—CH═CH—CH₃, —CH₂—CH(CH₃)—CH₂—CH═CH—CH₃, —C₂H₄—CH═CH—CH(CH₃)₂, —C₂H₄—CH═C(CH₃)—C₂H₅, —C₂H₄—C(CH₃)═CH—C₂H₅, —CH₂—CH(CH₃)—CH═CH—C₂H₅, —CH₂—CH═CH—CH₂—CH(CH₃)₂, —CH₂—CH═CH—CH(CH₃)—C₂H₅, —CH₂—CH═C(CH₃)—C₃H₇, —CH₂—C(CH₃)═CH—C₃H₇, —C₂H₄—CH(CH₃)—C(CH₃)═CH₂, —CH₂—CH(CH₃)—CH₂—C(CH₃)═CH₂, —CH₂—CH(CH₃)—CH(CH₃)—CH═CH₂, —C₂H₄—C(CH₃)₂—CH═CH₂, —CH₂—C(CH₃)₂—CH₂—CH═CH₂, —C₂H₄—C(CH₃)═C(CH₃)₂, —CH₂—CH(CH₃)—CH═C(CH₃)₂, —CH₂—C(CH₃)₂—CH═CH—CH₃, —CH₂—CH(CH₃)—C(CH₃)═CH—CH₃, —CH₂—CH═C(CH₃)—CH(CH₃)₂, —CH₂—C(CH₃)═CH—CH(CH₃)₂, —CH₂—C(CH₃)═C(CH₃)—C₂H₅, —CH₂—CH═CH—C(CH₃)₃, —CH₂—C(CH₃)₂—C(CH₃)═CH₂, —CH₂—CH(C₂H₅)—C(CH₃)═CH₂, —CH₂—C(CH₃)(C₂H₅)—CH═CH₂, —CH₂—CH(CH₃)—C(C₂H₅)═CH₂, —C₂H₄—C(C₃H₇)═CH₂, —C₂H₄—C(C₂H₅)═CH—CH₃, —CH₂—CH(C₂H₅)—CH═CH—CH₃, —CH₂—C(C₄H₉)═CH₂, —CH₂—C(C₃H₇)═CH—CH₃, —CH₂—C(C₂H₅)═CH—C₂H₅, —CH₂—C(C₂H₅)═C(CH₃)₂, —CH₂—C[C(CH₃)₃]═CH₂, —CH₂—C[CH(CH₃)(C₂H₅)]═CH₂, —CH₂—C[CH₂—CH(CH₃)₂]═CH₂, —C₃H₆—CH═CH—CH═CH₂, —C₂H₄—CH═CH—CH₂—CH═CH₂, —CH₂—CH═CH—C₂H₄—CH═CH₂, —C₂H₄—CH═CH—CH═CH—CH₃, —CH₂—CH═CH—CH₂—CH═CH—CH₃, —CH₂—CH═CH—CH═CH—C₂H₅, —C₂H₄—CH═CH—C(CH₃)═CH₂, —C₂H₄—CH═C(CH₃)—CH═CH₂, —C₂H₄—C(CH₃)═CH—CH═CH₂, —CH₂—CH(CH₃)—CH═CH—CH═CH₂, —CH₂—CH═CH—CH₂—C(CH₃)═CH₂, —CH₂—CH═CH—CH(CH₃)—CH═CH₂, —CH₂—CH═C(CH₃)—CH₂—CH═CH₂, —CH₂—C(CH₃)═CH—CH₂—CH═CH₂, —CH₂—CH═CH—CH═C(CH₃)₂, —CH₂—CH═CH—C(CH₃)═CH—CH₃, —CH₂—CH═C(CH₃)—CH═CH—CH₃, —CH₂—C(CH₃)═CH—CH═CH—CH₃, —CH₂—CH═C(CH₃)—C(CH₃)═CH₂, —CH₂—C(CH₃)═CH—C(CH₃)═CH₂, —CH₂—C(CH₃)═C(CH₃)—CH═CH₂, —CH₂—CH═CH—CH═CH—CH═CH₂, —C₆H₁₂—CH═CH₂, —C₅H₁₀—CH═CH—CH₃, —C₄H₈—CH═CH—C₂H₅, C₃H₆—CH═CH—C₃H₇, —C₂H₄—CH═CH—C₄H₉, —C₅H₁₀—C(CH₃)═CH₂, —C₄H₈—CH(CH₃)—CH═CH₂, —C₃H₆—CH(CH₃)—CH₂—CH═CH₂, —C₂H₄—CH(CH₃)—C₂H₄—CH═CH₂, —C₄H₈—CH═C(CH₃)₂, —C₄H₈—C(CH₃)═CH—CH₃, —C₃H₆—CH(CH₃)—CH═CH—CH₃, —C₂H₄—CH(CH₃)—CH₂—CH═CH—CH₃, —C₃H₆—CH═CH—CH(CH₃)₂, —C₃H₆—CH═C(CH₃)—C₂H₅, —C₃H₆—C(CH₃)═CH—C₂H₅, —C₂H₄—CH(CH₃)—CH═CH—C₂H₅, —C₂H₄—CH═CH—CH₂—CH(CH₃)₂, —C₂H₄—CH═CH—CH(CH₃)—C₂H₅, C₂H₄—CH═C(CH₃)—C₃H₇, —C₂H₄—C(CH₃)═CH—C₃H₇, —C₃H₆—CH(CH₃)—C(CH₃)═CH₂, —C₂H₄—CH(CH₃)—CH₂—C(CH₃)═CH₂, —C₂H₄—CH(CH₃)—CH(CH₃)—CH═CH₂, —C₃H₆—C(CH₃)₂—CH═CH₂, —C₂H₄—C(CH₃)₂—CH₂—CH═CH₂, —C₃H₆—C(CH₃)═C(CH₃)₂, —C₂H₄—CH(CH₃)—CH═C(CH₃)₂, —C₂H₄—C(CH₃)₂—CH═CH—CH₃, —C₂H₄—CH(CH₃)—C(CH₃)═CH—CH₃, —C₂H₄—CH═C(CH₃)—CH(CH₃)₂, —C₂H₄—C(CH₃)═CH—CH(CH₃)₂, —C₂H₄—C(CH₃)═C(CH₃)—C₂H₅, —C₂H₄—CH═CH—C(CH₃)₃, —C₂H₄—C(CH₃)₂—C(CH₃)═CH₂, —C₂H₄—CH(C₂H₅)—C(CH₃)═CH₂, —C₂H₄—C(CH₃)(C₂H₅)—CH═CH₂, —C₂H₄—CH(CH₃)—C(C₂H₅)═CH₂, —C₃H₆—C(C₃H₇)═CH₂, —C₃H₆—C(C₂H₅)═CH—CH₃, —C₂H₄—CH(C₂H₅)—CH═CH—CH₃, —C₂H₄—C(C₄H₉)═CH₂, —C₂H₄—C(C₃H₇)═CH—CH₃, —C₂H₄—C(C₂H₅)═CH—C₂H₅, —C₂H₄—C(C₂H₅)═C(CH₃)₂, —C₂H₄—C[C(CH₃)₃]═CH₂, —C₂H₄—C[CH(CH₃)(C₂H₅)]═CH₂, —C₂H₄—C[CH₂—CH(CH₃)₂]═CH₂, —C₄H₈—CH═CH—CH═CH₂, —C₃H₆—CH═CH—CH₂—CH═CH₂, —C₂H₄—CH═CH—C₂H₄—CH═CH₂, —C₃H₆—CH═CH—CH═CH—CH₃, —C₂H₄—CH═CH—CH₂—CH═CH—CH₃, —C₂H₄—CH═CH—CH═CH—C₂H₅, —C₃H₆—CH═CH—C(CH₃)═CH₂, —C₃H₆—CH═C(CH₃)—CH═CH₂, —C₃H₆—C(CH₃)═CH—CH═CH₂, —C₂H₄—CH(CH₃)—CH═CH—CH═CH₂, —C₂H₄—CH═CH—CH₂—C(CH₃)═CH₂, —C₂H₄—CH═CH—CH(CH₃)—CH═CH₂, —C₂H₄—CH═C(CH₃)—CH₂—CH═CH₂, —C₂H₄—C(CH₃)═CH—CH₂—CH═CH₂, —C₂H₄—CH═CH—CH═C(CH₃)₂, —C₂H₄—CH═CH—C(CH₃)═CH—CH₃, —C₂H₄—CH═C(CH₃)—CH═CH—CH₃, —C₂H₄—C(CH₃)═CH—CH═CH—CH₃, —C₂H₄—CH═C(CH₃)—C(CH₃)═CH₂, —C₂H₄—C(CH₃)═CH—C(CH₃)═CH₂, —C₂H₄—C(CH₃)═C(CH₃)—CH═CH₂, —CH═CH-Ph and —C₂H₄—CH═CH—CH═CH—CH═CH₂.

[0157] “Alkenylene” refers to a straight or branched chain divalent hydrocarbon radical having 2 to 12 carbon atoms and one or more carbon-carbon double bonds, more preferably from 2 to 8 carbon atoms, and most preferably 2 to 6 carbon atoms.

[0158] “Alkynyl” refers to groups of from 2 to 12 carbon atoms, preferably from 2 to 8 carbon atoms, either straight or branched containing at least one triple bond but optionally containing more than one triple bond, and additionally optionally containing one or more double bonded moieties. As used herein, the term “linear or branched C₂-C₈ alkynyl” refers to —C≡CH, —C≡C—CH₃, —CH₂—C≡CH, —C₂H₄—C≡CH, —CH₂—C≡C—CH₃, —C≡C—C₂H₅, —C₂H₄—C≡C—CH₃, —CH₂—C≡C—C₂H₅, —C≡C—C₃H₇, —CH(CH₃)—C≡CH, —CH₂—CH(CH₃)—C≡CH, —CH(CH₃)—CH₂—C≡CH, —CH(CH₃)—C≡C—CH₃, —C₄H₈—C≡CH, —C₃H₆—C≡C—CH₃, —C₂H₄—C≡C—C₂H₅, —CH₂—C≡C—C₃H₇, —C≡C—C₄H₉, —C₂H₄—CH(CH₃)—C≡CH, —CH₂—CH(CH₃)—CH₂—C≡CH, —CH(CH₃)—C₂H₄—C≡CH, —CH₂—CH(CH₃)—C≡C—CH₃, —CH(CH₃)—CH₂—C≡C—CH₃, —CH(CH₃)—C≡C—C₂H₅, —CH₂—C≡C—CH(CH₃)₂, —C≡C—CH(CH₃)—C₂H₅, —C≡C—CH₂—CH(CH₃)₂, —C≡C—C(CH₃)₃, —C₃H₆—C≡CH, —CH(C₂H₅)—C≡C—CH₃, —C(CH₃)₂—C≡C—CH₃, —CH(C₂H₅)—CH₂—C≡CH, —CH₂—CH(C₂H₅)—C≡CH, —C(CH₃)₂—CH₂—C≡CH, —CH₂—C(CH₃)₂—C≡CH, —CH(CH₃)—CH(CH₃)—C≡CH, —CH(C₃H₇)—C≡CH, —C(CH₃)(C₂H₅)—C≡CH, —C≡C—C≡CH, —CH₂—C≡C—C≡CH, —C≡C—C≡C—CH₃, —CH(C≡CH)₂, —C₂H₄—C≡C—C≡CH, —CH₂—C≡C—CH₂—C≡CH, —C≡C—C₂H₄—C≡CH, —CH₂—C≡C—C≡C—CH₃, —C≡C—CH₂—C≡C—CH₃, —C≡C—C≡C—C₂H₅, —C≡C—CH(CH₃)—C≡CH, —CH(CH₃)—C≡C—C≡CH, —CH(C≡CH)—CH₂—C≡CH, —C(C≡CH)₂—CH₃, —CH₂—CH(C≡CH)₂, —CH(C≡CH)—C≡C—CH₃, —C₅H₁₀—C≡CH, —C₄H₈—C≡C—CH₃, —C₃H₆—C≡C—C₂H₅, —C₂H₄—C≡C—C₃H₇, —CH₂—C≡C—C₄H₉, —C₃H₆—CH(CH₃)—C≡CH, —C₂H₄—CH(CH₃)—CH₂—C≡CH, —CH₂—CH(CH₃)—C₂H₄—C≡CH, —C₂H₄—CH(CH₃)—C≡C—CH₃, —CH₂—CH(CH₃)—CH₂—C≡C—CH₃, —CH₂—CH(CH₃)—C≡C—C₂H₅, —C₂H₄—C≡C—CH(CH₃)₂, —CH₂—C≡C—CH(CH₃)—C₂H₅, —CH₂—C≡C—CH₂—CH(CH₃)₂, —CH₂—C≡C—C(CH₃)₃, —CH₂—CH(C₂H₅)—C≡C—CH₃, —CH₂—C(CH₃)₂—C≡C—CH₃, —CH₂—CH(C₂H₅)—CH₂—C≡CH, —C₂H₄—CH(C₂H₅)—C≡CH, —CH₂—C(CH₃)₂—CH₂—C≡CH, —C₂H₄—C(CH₃)₂—C≡CH, —CH₂—CH(CH₃)—CH(CH₃)—C≡CH, —CH₂—CH(C₃H₇)—C≡CH, —CH₂—C(CH₃)(C₂H₅)—C≡CH, —C₃H₆—C≡C—C≡CH, —C₂H₄—C≡C—CH₂—C≡CH, —CH₂—C≡C—C₂H₄—C≡CH, —C₂H₄—C≡C—C≡C—CH₃, —CH₂—C≡C—CH₂—C≡C—CH₃, —CH₂—C≡C—C≡C—C₂H₅, —CH₂—C≡C—CH(CH₃)—C≡CH, —CH₂—CH(CH₃)—C≡C—C≡CH, —CH₂—CH(C≡CH)—CH₂—C≡CH, —CH₂—C(C≡CH)₂—CH₃, —C₂H₄—CH(C≡CH)₂, —CH₂—CH(C≡CH)—C≡C—CH₃, —C₆H₁₂—C≡CH, —C₅H₁₀—C≡C—CH₃, —C₄H₈—C≡C—C₂H₅, —C₃H₆—C≡C—C₃H₇, —C₂H₄—C≡C—C₄H₉, —C₄H₈—CH(CH₃)—C≡CH, —C₃H₆—CH(CH₃)—CH₂—C≡CH, —C₂H₄—CH(CH₃)—C₂H₄—C≡CH, —C₃H₆—CH(CH₃)—C≡C—CH₃, —C₂H₄—CH(CH₃)—CH₂—C≡C—CH₃, —C₂H₄—CH(CH₃)—C≡C—C₂H₅, —C₃H₆—C≡C—CH(CH₃)₂, —C₂H₄—C≡C—CH(CH₃)—C₂H₅, C₂H₄—C≡C—CH₂—CH(CH₃)₂, —C₂H₄—C≡C—C(CH₃)₃, —C₂H₄—CH(C₂H₅)—C≡C—CH₃, —C₂H₄—C(CH₃)₂—C≡C—CH₃, —C₂H₄—CH(C₂H₅)—CH₂—C≡CH, —C₃H₆—CH(C₂H₅)—C≡CH, —C₂H₄—C(CH₃)₂—CH₂—C≡CH, —C₃H₆—C(CH₃)₂—C≡CH, —C₂H₄—CH(CH₃)—CH(CH₃)—C≡CH, —C₂H₄—CH(C₃H₇)—C≡CH, —C₂H₄—C(CH₃)(C₂H₅)—C≡CH, —C₄H₈—C≡C—C≡CH, —C₃H₆—C≡C—CH₂—C≡CH, —C₂H₄—C≡C—C₂H₄—C≡CH, —C₃H₆—C≡C—C≡C—CH₃, —C₂H₄—C≡C—CH₂—C≡C—CH₃, —C₂H₄—C≡C—C≡C—C₂H₅, —C₂H₄—C≡C—CH(CH₃)—C≡CH, —C≡C-Ph, —C₂H₄—CH(CH₃)—C≡C—C≡CH, —C₂H₄—CH(C≡CH)—CH₂—C≡CH, —C₂H₄—C(C≡CH)₂—CH₃, —C₃H₆—CH(C≡CH)₂, and —C₂H₄—CH(C≡CH)—C≡C—CH₃.

[0159] “Cycloalkyl” refers to cyclic alkyl groups of from 3 to 12 carbon atoms, preferably from 3 to 8 carbon atoms, having a single cyclic ring or multiple condensed rings which can be optionally substituted with from 1 to 3 alkyl groups. Exemplary cycloalkyl groups include, but are not limited to, single ring structures such as cyclopropyl, cyclobutyl, cyclopentyl, cyclooctyl, 1-methylcyclopropyl, 2-methyl-cyclopentyl, 2-methylcyclooctyl, and the like, or multiple ring structures, including bridged ring systems, such as adamantyl. As used herein, C₃-C₈ cycloalkyl refers to cyclo-C₃H₅, cyclo-C₄H₇, cyclo-C₅H₉, cyclo-C₆H₁₁, cyclo-C₇H₁₃, and cyclo-C₈H₁₅.

[0160] “Cycloalkylalkyl” refers to an alkyl substituted with a cycloalkyl, i.e., cycloalkyl-alkyl-groups, preferably having from 1 to 6 carbon atoms in the alkyl moiety and from 3 to 12 carbon atoms in the cycloalkyl moiety. Such cycloalkylalkyl groups are exemplified by cyclopropylmethyl, cyclohexylethyl and the like.

[0161] “Aryl” refers to an unsaturated aromatic carbocyclic group of from 6 to 12 carbon atoms inclusively having a single ring (e.g., phenyl) or multiple condensed rings (e.g., naphthyl or anthryl). Exemplary aryls include phenyl, pyridyl, naphthyl and the like.

[0162] “Arylalkyl” refers to an alkyl substituted with an aryl, i.e., aryl-alkyl groups, preferably having from 1 to 6 carbon atoms in the alkyl moiety and from 6 to 12 carbon atoms inclusively in the aryl moiety. Such arylalkyl groups are exemplified by benzyl, phenethyl and the like.

[0163] “Heteroalkyl, “heteroalkenyl,” and heteroalkynyl,” refer to alkyl, alkenyl and alkynyl as defined herein in which one or more of the carbon atoms are each independently replaced with the same or different heteroatoms or heteroatomic groups. Heteroatoms and/or heteroatomic groups which can replace the carbon atoms include, but are not limited to, —O—, —S—, —S—O—, —NR^{α}—, —PH—, —S(O)—, —S(O)₂—, —S(O)NR^{α}—, —S(O)₂NR^{α}—, and the like, including combinations thereof, where each R^{α} is independently selected from hydrogen, alkyl, heteroalkyl, cycloalkyl, heterocycloalkyl, aryl, and heteroaryl.

[0164] “Heteroaryl” refers to an aromatic heterocyclic group of from 1 to 10 carbon atoms and 1 to 4 heteroatoms selected from oxygen, nitrogen and sulfur within the ring. Such heteroaryl groups can have a single ring (e.g., pyridyl or furyl) or multiple condensed rings (e.g., indolizinyl or benzothienyl). As used herein, the term “C₁-C₁ heteroaryl” refers to aromatic residues with one or more heteroatoms such as O, S, N and especially N and refers preferably to

[chemical structure]

[chemical structure]

[chemical structure]

[chemical structure]

[0165] “Heteroarylalkyl” refers to an alkyl substituted with a heteroaryl, i.e., heteroaryl-alkyl-groups, preferably having from 1 to 6 carbon atoms in the alkyl moiety and from 5 to 12 ring atoms inclusively in the heteroaryl moiety. Such heteroarylalkyl groups are exemplified by pyridylmethyl and the like.

[0166] “Heterocycle”, “heterocyclic” and interchangeably “heterocycloalkyl” refer to a saturated or unsaturated group having a single ring or multiple condensed rings, from 2 to 9 carbon ring atoms and from 1 to 4 hetero ring atoms inclusively selected from nitrogen, sulfur or oxygen within the ring. Such heterocyclic groups can have a single ring (e.g., piperidinyl or tetrahydrofuryl) or multiple condensed rings (e.g., indolinyl, dihydrobenzofuran or quinuclidinyl). Examples of heterocycles include, but are not limited to, furan, thiophene, thiazole, oxazole, pyrrole, imidazole, pyrazole, pyridine, pyrazine, pyrimidine, pyridazine, indolizine, isoindole, indole, indazole, purine, quinolizine, isoquinoline, quinoline, phthalazine, naphthylpyridine, quinoxaline, quinazoline, cinnoline, pteridine, carbazole, carboline, phenanthridine, acridine, phenanthroline, isothiazole, phenazine, isoxazole, phenoxazine, phenothiazine, imidazolidine, imidazoline, piperidine, piperazine, pyrrolidine, indoline and the like. As used herein, the term “C₂-C₉ heterocyclyl” covers saturated or partly unsaturated heterocyclic residues with 2 to 9 ring carbon atoms, but not aromatic residues and covers also bicyclic saturated or partly unsaturated residues with 2 to 9 ring carbon atoms, but preferably not fully aromatic residues which are aromatic throughout the bicyclic system but may comprise partly aromatic ring systems, wherein one ring of the bicyclic ring system is aromatic. Preferably “C₂-C₉ heterocyclyl” refers to

[chemical structure]

[chemical structure]

[chemical structure]

[chemical structure]

[0167] As used herein, the term “3-membered heterocyclyl” refers to a substituted or non substituted ring system of three atoms including at least one heteroatom such as O, S, SO, SO₂, N or NO. The term “4-membered heterocyclyl” refers to a substituted or non substituted ring system of four atoms including at least one heteroatom such as O, S, SO, SO₂, N or NO. The term “5-membered heterocyclyl” refers to a substituted or non substituted ring system of five atoms including at least one heteroatom such as O, S, SO, SO₂, N or NO. The term “6-membered heterocyclyl” refers to a substituted or non substituted ring system of six atoms including at least one heteroatom such as O, S, SO, SO₂, N or NO. The term “monounsaturated 4-membered heterocyclyl” refers to a substituted or non substituted ring system of four atoms including at least one heteroatom such as O, S, SO, SO₂, N or NO, and one double bond. The term “monounsaturated 5-membered heterocyclyl” refers to a substituted or non substituted ring system of five atoms including at least one heteroatom such as O, S, SO, SO₂, N or NO, and one double bond. The term “monounsaturated 6-membered heterocyclyl” refers to a substituted or non substituted ring system of six atoms including at least one heteroatom such as O, S, SO, SO₂, N or NO, and one double bond.

[0168] “Heterocycloalkylalkyl” refers to an alkyl substituted with a heterocycloalkyl, i.e., heterocycloalkyl-alkyl groups, preferably having from 1 to 6 carbon atoms in the alkyl moiety and from 3 to 12 ring atoms in the heterocycloalkyl moiety.

[0169] “Oxy” refers to a divalent group —O—, which may have various substituents to form different oxy groups, including ethers and esters.

[0170] “Alkoxy” or “alkyloxy” are used interchangeably herein to refer to the group —OR^{α}, wherein R^{α} is an alkyl group, including optionally substituted alkyl groups.

[0171] “Aryloxy” as used herein refer to the group —OR^{α} wherein R^{α} is an aryl group as defined above including optionally substituted aryl groups as also defined herein.

[0172] “Carboxy” refers to —COOH.

[0173] “Carboxyalkyl” refers to an alkyl substituted with a carboxy group.

[0174] “Carbonyl” refers to the group —C(O)—. Substituted carbonyl refers to the group R^{α}—C(O)—R^{α}, where each R^{α} is independently selected from optionally substituted alkyl, cycloalkyl, cycloheteroalkyl, alkoxy, carboxy, aryl, aryloxy, heteroaryl, heteroarylalkyl, acyl, alkoxycarbonyl, sulfanyl, sulfinyl, sulfonyl, and the like. Typical substituted carbonyl groups including acids, ketones, aldehydes, amides, esters, acyl halides, thioesters, and the like.

[0175] “Amino” refers to the group —NH₂. Substituted amino refers to the group —NHR^{α}, NR^{α}R^{α}, and NR^{α}R^{α}R^{α}, where each R^{α} is independently selected from optionally substituted alkyl, cycloalkyl, cycloheteroalkyl, alkoxy, carboxy, aryl, aryloxy, heteroaryl, heteroarylalkyl, acyl, alkoxycarbonyl, sulfanyl, sulfinyl, sulfonyl, and the like. Typical amino groups include, but are limited to, dimethylamino, diethylamino, trimethylammonium, triethylammonium, methylysulfonylamino, furanyl-oxy-sulfamino, and the like.

[0176] “Aminoalkyl” refers to an alkyl group in which one or more of the hydrogen atoms are replaced with an amino group, including a substituted amino group.

[0177] “Aminocarbonyl” refers to a carbonyl group substituted with an amino group, including a substituted amino group, as defined herein, and includes amides.

[0178] “Aminocarbonylalkyl” refers to an alkyl substituted with an aminocarbonyl group, as defined herein.

[0179] “Halogen” or “halo” refers to fluoro, chloro, bromo and iodo.

[0180] “Haloalkyl” refers to an alkyl group in which one or more of the hydrogen atoms are replaced with a halogen. Thus, the term “haloalkyl” is meant to include monohaloalkyls, dihaloalkyls, trihaloalkyls, etc. up to perhaloalkyls. As used herein, the expression “C₁-C₂ haloalkyl” includes 1-fluoromethyl, difluoromethyl, trifluoromethyl, 1-fluoroethyl, 1,1-difluoroethyl, 1,2-difluoroethyl, 1,1,1 trifluoroethyl, perfluoroethyl, etc.

[0181] “Hydroxy” refers to —OH.

[0182] “Hydroxyalkyl” refers to an alkyl substituted with one or more hydroxy group.

[0183] “Thio” or “sulfanyl” refers to —SH. Substituted thio or sulfanyl refers to —S—R^{α}, where R^{α} is an alkyl, aryl or other suitable substituent.

[0184] “Alkylthio” refers to —SR^{α}, where R^{α} is an alkyl, which can be optionally substituted. Typical alkylthio group include, but are not limited to, methylthio, ethylthio, n-propylthio, and the like.

[0185] “Alkylthioalkyl” refers to an alkyl substituted with an alkylthio group, —SR^{α}, where R^{α} is an alkyl, which can be optionally substituted.

[0186] “Thiocarbonyl” refers to a carbonyl group substituted with a thio group, including a substituted thio group, as defined herein, and includes thiosesters.

[0187] “Sulfonyl” refers to —SO₂—. Substituted sulfonyl refers to —SO₂—R^{α}, where R^{α} is an alkyl, aryl or other suitable substituent.

[0188] “Alkylsulfonyl” refers to —SO₂—R^{α}, where R^{α} is an alkyl, which can be optionally substituted. Typical alkylsulfonyl groups include, but are not limited to, methylsulfonyl, ethylsulfonyl, n-propylsulfonyl, and the like.

[0189] “Alkylsulfonylalkyl” refers to an alkyl substituted with an alkylsulfonyl group, —SO₂—R^{α}, where R^{α} is an alkyl, which can be optionally substituted.

[0190] “Membered ring” is meant to embrace any carbocyclic or heterocyclic, aromatic or non aromatic structure. The number preceding the term “membered” denotes the number of skeletal atoms that constitute the ring. Thus, for example, cyclohexyl, pyridine, pyran and thiopyran are 6-membered rings and cyclopentyl, pyrrole, furan, and thiophene are 5-membered rings.

[0191] “Fused bicyclic ring” refers to both unsubstituted and substituted carbocyclic and/or heterocyclic ring moieties having 5 or 8 atoms in each ring, the rings having 2 common atoms.

[0192] “Optionally substituted” as used herein with respect to the foregoing chemical groups means that positions of the chemical group occupied by hydrogen can be substituted with another atom, such as carbon, oxygen, nitrogen, or sulfur, or a chemical group, exemplified by, but not limited to, hydroxy, oxo, nitro, methoxy, ethoxy, alkoxy, substituted alkoxy, trifluoromethoxy, haloalkoxy, fluoro, chloro, bromo, iodo, halo, methyl, ethyl, propyl, butyl, alkyl, alkenyl, alkynyl, substituted alkyl, trifluoromethyl, haloalkyl, hydroxyalkyl, alkoxyalkyl, thio, alkylthio, acyl, carboxy, alkoxycarbonyl, carboxamido, substituted carboxamido, alkylsulfonyl, alkylsulfinyl, alkylsulfonylamino, sulfonamido, substituted sulfonamido, cyano, amino, substituted amino, alkylamino, dialkylamino, aminoalkyl, acylamino, amidino, amidoximo, hydroxamoyl, phenyl, aryl, substituted aryl, aryloxy, arylalkyl, arylalkenyl, arylalkynyl, pyridyl, imidazolyl, heteroaryl, substituted heteroaryl, heteroaryloxy, heteroarylalkyl, heteroarylalkenyl, heteroarylalkynyl, cyclopropyl, cyclobutyl, cyclopentyl, cyclohexyl, cycloalkyl, cycloalkenyl, cycloalkylalkyl, substituted cycloalkyl, cycloalkyloxy, pyrrolidinyl, piperidinyl, morpholino, heterocycle, (heterocycle)oxy, and (heterocyclyl)alkyl; where preferred heteroatoms are oxygen, nitrogen, and sulfur. However it is clear to a skilled person that the term “can be substituted” refers to the replacement of a hydrogen atom by one of the above-mentioned chemical groups. Additionally, where open valences exist on these substitute chemical groups they can be further substituted with alkyl, cycloalkyl, aryl, heteroaryl, and/or heterocycle groups, that where these open valences exist on carbon they can be further substituted by halogen and by oxygen-, nitrogen-, or sulfur-bonded substituents, and where multiple such open valences exist, these groups can be joined to form a ring, either by direct formation of a bond or by formation of bonds to a new heteroatom, preferably oxygen, nitrogen, or sulfur. It is further contemplated that the above substitutions can be made provided that replacing the hydrogen with the substituent does not introduce unacceptable instability to the molecules of the present disclosure, and is otherwise chemically reasonable. One of ordinary skill in the art would understand that with respect to any chemical group described as optionally substituted, only sterically practical and/or synthetically feasible chemical groups are meant to be included. Finally, “optionally substituted” as used herein refers to all subsequent modifiers in a term or series of chemical groups. For example, in the term “optionally substituted arylalkyl,” the “alkyl” portion and the “aryl” portion of the molecule may or may not be substituted, and for the series “optionally substituted alkyl, alkenyl, alkynyl, alkoxy, carboxy, aminocarbonyl, thiocarbonyl, heteroalkyl, heteroalkenyl, heteroalkynyl, carboxyalkyl, aminoalkyl, haloalkyl, alkylthioalkyl, cycloalkyl, aryl, arylalkyl, heterocycloalkyl, heteroaryl, and heteroarylalkyl,” alkyl, alkenyl, alkynyl, alkoxy, carboxy, aminocarbonyl, thiocarbonyl, heteroalkyl, heteroalkenyl, heteroalkynyl, carboxyalkyl, aminoalkyl, haloalkyl, alkylthioalkyl, cycloalkyl, aryl, arylalkyl, heterocycloalkyl, heteroaryl, and heteroarylalkyl groups, independently of the others, may or may not be substituted.

[0193] Preferably “optionally substituted” means that 1 to 4 positions of the chemical group occupied by hydrogen can be substituted by Z^{a}, Z^{b}, Z^{c} and Z^{d}, wherein Z^{a} to Z^{d} represent independently of each other —CH₃, —C₂H₅, —C₃H₇, —CH(CH₃)₂, —OH, —OCH₃, —OC₂H₅, —OC₃H₇, —NH₂, —N(CH₃)₂, —F, —Cl, —Br, —I, —CN, —CH₂F, —CHF₂, —CF₃, —OCHF₂, or —OCF₃.

[0194] Preferably “optionally substituted” means that 1 to 5 positions of the chemical group occupied by hydrogen can be substituted by Z^{a}, Z^{b}, Z^{c} Z^{d} and Z^{e}, wherein Z^{a} to Z^{e} represent independently of each other —CH₃, —C₂H₅, —C₃H₇, —CH(CH₃)₂, —OH, —OCH₃, —OC₂H₅, —OC₃H₇, —NH₂, —N(CH₃)₂, —F, —Cl, —Br, —I, —CN, —CH₂F, —CHF₂, —CF₃, —OCHF₂, or —OCF₃.

### Polypeptides Having Enzyme Activity to Reduce Imines

[0195] As shown in FIG. 1, in the BHAP, the enzyme β-hydroxyaspartate aldolase (2) catalyzes the condensation of glycine and glyoxylate to (2R,3S)-β-hydroxyaspartate and the enzyme β-hydroxyaspartate dehydratase (3) catalyzes the subsequent dehydration to iminosuccinate. The iminosuccinate is reduced to aspartate by the iminosuccinate reductase (4) in the presence of the cofactor NADH and the formed aspartate is finally converted with glyoxylate to oxaloacetate in the presence of aspartate-glyoxylate aminotransferase (1).

[0196] It was generally assumed that the product of the dehydration of (2R,3S)-β-hydroxyaspartate is oxaloacetate (Biochem. J. 1965, 97(2), 547). However, the inventors could show that the reaction product of the β-hydroxyaspartate dehydratase enzyme is actually iminosuccinate, a compound that is highly labile in aqueous solution and hydrolyzes to oxaloacetate (t_{1/2}=1.48 s; calculated from data of Mortarino et al., 1996, Eur. J. Biochem. 239(2), 418-426). To this end, glyoxylate, glycine and the required cofactors together with the β-hydroxyaspartate aldolase and dehydratase enzymes were brought to reaction in D₂O and subsequently reduced to monodeuterated aspartate by sodium cyanoborohydride (FIG. 3). The conversion to monodeuterated aspartate upon addition of sodium cyanoborohydride demonstrates the formation of iminosuccinate by the β-hydroxyaspartate dehydratase enzyme catalyzed dehydration of β-hydroxyaspartate.

[0197] By phylogenetic analysis the inventors have revealed that the BHAP is widely distributed among proteobacteria, particularly alpha- and gamma-proteobacteria. Thus, proteins, which exhibit imine reductase and/or iminosuccinate reductase activity, are widespread in many proteobacteria, such as Aestuariivita boseongensis, Agrobacterium sp., Ahrensia sp., Aminobacter aminovorans, Amphritea atlantica, Antarctobacter heliothermus, Aquisalimonas asiatica, Aurantimonas altamirensis, Aureimonas altamirensis, Brevirhabdus pacifica, Citreicella marina, Citreicella sp., Citreicella thiooxidans, Citreimonas salinaria, Colwellia piezophila, Colwellia psychrerythraea, Colwellia sp, Cribrihabitans marinus, Defluviimonas indica, Defluviimonas sp., Dinoroseobacter shibae, Ensifer fredii, Ensifer meliloti, Ensifer sp., Glaciecola sp., Granulosicoccus antarcticus, Halocynthiibacter sp., Hasllibacter halocynthiae, Hyphomicrobium sulfonivorans, Jannaschia pohangensis, Jannaschia rubra, Jannaschia sp., Labrenzia aggregata, Labrenzia alba, Labrenzia alexandrii, Labrenzia sp., Leisingera aquaemixtae, Leisingera nanhaiensis, Leisingera sp., Litoreibacter ascidiaceicola, Litoreibacter halocynthiae, Litoreibacter janthinus, Litoreibacter meonggei, Litoreibacter ponti, Loktanella koreensis, Loktanella litorea, Loktanella maricola, Loktanella rosea, Loktanella sediminilitoris, Loktanella sediminum, Loktanella sp., Loktanella vestfoldensis, Mameliella alba, Maribius sp., Marinobacter psychrophilus, Marinobacter sp., Marinobacterium lutimaris, Marinobacterium mangrovicola, Marinobacterium sp., Marinomonas sp., Marinovum algicola, Maritimibacter sp., Marivita geojedonensis, Marivita hallyeonensis, Mesorhizobium sp., Mesorhizobium sp., Methylobacterium komagatae, Methylobacterium mesophilicum, Methylobacterium radiotolerans, Methylobacterium sp., Methylobacterium sp., Methylopila sp., Neptunomonas antarctica, Nitratireductor sp., Oceanicola flagellatus, Oceanicola nitratireducens, Oceanicola sp., Oceaniovalibus guishaninsula, Octadecabacter antarcticus, Octadecabacter arcticus, Octadecabacter temperatus, Palleronia marisminoris, pAqui_F126, Paracoccus alcaliphilus, Paracoccus alkenifer, Paracoccus aminophilus, Paracoccus aminovorans, Paracoccus denitrificans, Paracoccus halophilus, Paracoccus homiensis, Paracoccus isoporae, Paracoccus pantotrophus, Paracoccus saliphilus, Paracoccus sediminis, Paracoccus sp., Paracoccus thiocyanatus, Paracoccus versutus, Paracoccus yeei, Pararhodobacter aggregans, pCaer_C109, pDaep_A276, Pelagibaca bermudensis, Pelagicola litoralis, Pelagimonas varians, Phaeobacter gallaeciensis, Phaeobacter inhibens, Planktotalea frisia, pMeth_A285, Ponticoccus litoralis, Ponticoccus sp., Poseidonocella pacifica, Pseudomonas stutzeri, Pseudopelagicola gijangensis, Pseudorhodobacter antarcticus, Pseudoruegeria haliotis, Pseudoruegeria marinistellae, Psychrobacter arcticus, Psychrobacter cryohalolentis, Psychrobacter sp., Psychrobacter urativorans, Puniceibacterium sediminis, Rhizobium etli, Rhizobium etli, Rhizobium etli, Rhizobium leguminosarum, Rhizobium lusitanum, Rhizobium rhizogenes, Rhizobium sp., Rhizobium taibaishanense, Rhizobium tropici, Rhizobium yanglingense, Rhodobaca barguzinensis, Rhodobacteraceae bacterium, Rhodobacteraceae sp., Rhodobacterales bacterium, Rhodovibrio salinarum, Rhodovulum kholense, Rhodovulum sp., Rhodovulum sulfidophilum, Roseinatronobacter thiooxidans, Roseivivax halodurans, Roseivivax isoporae, Roseivivax lentus, Roseivivax sediminis, Roseobacter denitrificans, Roseobacter litoralis, Roseobacter sp., Roseovarius azorensis, Roseovarius indicus, Roseovarius litoreus, Roseovarius lutimaris, Roseovarius marisflavi, Roseovarius mucosus, Roseovarius nubinhibens, Roseovarius sediminilitoris, Roseovarius sp., Roseovarius tolerans, Rubellimicrobium mesophilum, Rubrimonas cliftonensis, Ruegeria atlantica, Ruegeria conchae, Ruegeria faecimaris, Ruegeria halocynthiae, Ruegeria marina, Ruegeria mobilis, Ruegeria scottomollicae, Ruegeria sp., Sagittula stellata, Salinihabitans flavidus, Shimia haliotis, Shimia sagamensis, Silicibacter sp., Sinorhizobium americanum, Sinorhizobium fredii, Sinorhizobium terangae, Solemya velum, Sphingomonas sp., Stappia aggregata, Starkeya novella, Sulfitobacter pseudonitzschiae, Sulfitobacter sp., Tateyamaria omphalii, Tateyamaria sp., Thalassobacter sp., Thalassobacter stenotrophicus, Thalassobius abyssi, Thalassobius aestuarii, Thalassobius mediterraneus, Thalassotalea sp., uncultured Rhodobacteriaceae, Yangia pacifica, Yangia pacifica, Yangia sp., Paracoccus sulfuroxidans, AP Rhodobacteraceae bacterium and Silicibacter pomeroyi.

[0198] Thus, the present invention is also directed to a method of preparing a primary amine compound of general formula (IB), comprising the steps of:
[0199] A1) Providing an imine compound of general formula (IIA); and
[0200] B1) Reacting imine compound of general formula (IIA) with a polypeptide having the enzymatic activity of an imine reductase in the presence of a cofactor, to afford primary amine of general formula (IB),
   wherein the polypeptide comprises the conserved amino acid sequence of GXKXGX₈GXKXGGX₂PXNX₇NHQSX₃LFX₄GX₈NX₂TAXRTAAX₄SX₃LX₈GX₂GAGXQ X₃QX₁₅WNX₃₉SX₁₅HX₃MGTDTX₂KXEX₁₃DX₃QX₄GEXQX₁₆GX₉RX₆TX₂DGXGX₃QDX A (SEQ ID NO: 610), wherein X represents independently for each occurrence an amino acid, wherein R¹ and R² have the meanings as defined herein, and
   the polypeptide is an imine reductase selected from Aestuariivita boseongensis, Agrobacterium sp., Ahrensia sp., Aminobacter aminovorans, Amphritea atlantica, Antarctobacter heliothermus, Aquisalimonas asiatica, Aurantimonas altamirensis, Aureimonas altamirensis, Brevirhabdus pacifica, Citreicella marina, Citreicella sp., Citreicella thiooxidans, Citreimonas salinaria, Colwellia piezophila, Colwellia psychrerythraea, Colwellia sp, Cribrihabitans marinus, Defluviimonas indica, Defluviimonas sp., Dinoroseobacter shibae, Ensifer fredii, Ensifer meliloti, Ensifer sp., Glaciecola sp., Granulosicoccus antarcticus, Halocynthiibacter sp., Hasllibacter halocynthiae, Hyphomicrobium sulfonivorans, Jannaschia pohangensis, Jannaschia rubra, Jannaschia sp., Labrenzia aggregata, Labrenzia alba, Labrenzia alexandrii, Labrenzia sp., Leisingera aquaemixtae, Leisingera nanhaiensis, Leisingera sp., Litoreibacter ascidiaceicola, Litoreibacter halocynthiae, Litoreibacter janthinus, Litoreibacter meonggei, Litoreibacter ponti, Loktanella koreensis, Loktanella litorea, Loktanella maricola, Loktanella rosea, Loktanella sediminilitoris, Loktanella sediminum, Loktanella sp., Loktanella vestfoldensis, Mameliella alba, Maribius sp., Marinobacter psychrophilus, Marinobacter sp., Marinobacterium lutimaris, Marinobacterium mangrovicola, Marinobacterium sp., Marinomonas sp., Marinovum algicola, Maritimibacter sp., Marivita geojedonensis, Marivita hallyeonensis, Mesorhizobium sp., Mesorhizobium sp., Methylobacterium komagatae, Methylobacterium mesophilicum, Methylobacterium radiotolerans, Methylobacterium sp., Methylobacterium sp., Methylopila sp., Neptunomonas antarctica, Nitratireductor sp., Oceanicola flagellatus, Oceanicola nitratireducens, Oceanicola sp., Oceaniovalibus guishaninsula, Octadecabacter antarcticus, Octadecabacter arcticus, Octadecabacter temperatus, Palleronia marisminoris, pAqui_F126, Paracoccus alcaliphilus, Paracoccus alkenifer, Paracoccus aminophilus, Paracoccus aminovorans, Paracoccus denitrificans, Paracoccus halophilus, Paracoccus homiensis, Paracoccus isoporae, Paracoccus pantotrophus, Paracoccus saliphilus, Paracoccus sediminis, Paracoccus sp., Paracoccus thiocyanatus, Paracoccus versutus, Paracoccus yeei, Pararhodobacter aggregans, pCaer_C109, pDaep_A276, Pelagibaca bermudensis, Pelagicola litoralis, Pelagimonas varians, Phaeobacter gallaeciensis, Phaeobacter inhibens, Planktotalea frisia, pMeth_A285, Ponticoccus litoralis, Ponticoccus sp., Poseidonocella pacifica, Pseudomonas stutzeri, Pseudopelagicola gijangensis, Pseudorhodobacter antarcticus, Pseudoruegeria haliotis, Pseudoruegeria marinistellae, Psychrobacter arcticus, Psychrobacter cryohalolentis, Psychrobacter sp., Psychrobacter urativorans, Puniceibacterium sediminis, Rhizobium etli, Rhizobium etli, Rhizobium etli, Rhizobium leguminosarum, Rhizobium lusitanum, Rhizobium rhizogenes, Rhizobium sp., Rhizobium taibaishanense, Rhizobium tropici, Rhizobium yanglingense, Rhodobaca barguzinensis, Rhodobacteraceae bacterium, Rhodobacteraceae sp., Rhodobacterales bacterium, Rhodovibrio salinarum, Rhodovulum kholense, Rhodovulum sp., Rhodovulum sulfidophilum, Roseinatronobacter thiooxidans, Roseivivax halodurans, Roseivivax isoporae, Roseivivax lentus, Roseivivax sediminis, Roseobacter denitrificans, Roseobacter litoralis, Roseobacter sp., Roseovarius azorensis, Roseovarius indicus, Roseovarius litoreus, Roseovarius lutimaris, Roseovarius marisflavi, Roseovarius mucosus, Roseovarius nubinhibens, Roseovarius sediminilitoris, Roseovarius sp., Roseovarius tolerans, Rubellimicrobium mesophilum, Rubrimonas cliftonensis, Ruegeria atlantica, Ruegeria conchae, Ruegeria faecimaris, Ruegeria halocynthiae, Ruegeria marina, Ruegeria mobilis, Ruegeria scottomollicae, Ruegeria sp., Sagittula stellata, Salinihabitans flavidus, Shimia haliotis, Shimia sagamensis, Silicibacter sp., Sinorhizobium americanum, Sinorhizobium fredii, Sinorhizobium terangae, Solemya velum, Sphingomonas sp., Stappia aggregata, Starkeya novella, Sulfitobacter pseudonitzschiae, Sulfitobacter sp., Tateyamaria omphalii, Tateyamaria sp., Thalassobacter sp., Thalassobacter stenotrophicus, Thalassobius abyssi, Thalassobius aestuarii, Thalassobius mediterraneus, Thalassotalea sp., uncultured Rhodobacteriaceae, Yangia pacifica, Yangia pacifica, Yangia sp., Paracoccus sulfuroxidans, AP Rhodobacteraceae bacterium or Silicibacter pomeroyi.

[0201] The imine reductases identified by the inventors comprise the conserved amino amino acids among the proteobacteria as listed in Table 1. The conserved amino acid sequence of SEQ ID NO: 610 reflects these conserved sites. The conserved sequence—in its common meaning in the art—is determined from multiple sequence alignments of the imine reductase sequences, wherein the sites conserved throughout all aligned sequences are listed in Table 1. As the aligned imine reductase sequences may contain gap(s) or deletion(s), the conserved sequence determined from these aligned sequences may also contain gap(s) or deletion(s). Although not explicitly mentioned throughout the disclosure, a skilled person readily envisions that the conserved sequence comprises gap(s) or deletion(s) which were generated by the sequence alignment.

TABLE 1
Conserved sites of the imine reductase enzyme
in proteobacteria identified by the inventors.

| | amino acid |
|---|---|
| position | sequence |
| 79 | G |
| 81 | K |
| 83 | G |
| 92 | G |
| 94 | K |
| 96-97 | GG |
| 100 | P |
| 102 | N |
| 110-113 | NHQS |
| 117-118 | LF |
| 123 | G |
| 132 | N |
| 135-136 | TA |
| 138-141 | RTAA |
| 146 | S |
| 150 | L |
| 159 | G |
| 162-164 | GAG |
| 166 | Q |
| 170 | Q |
| 186-187 | WN |
| 227 | S |
| 243 | H |
| 247-251 | MGTDT |
| 254 | K |
| 256 | E |
| 270 | D |
| 274 | Q |
| 279-280 | GE |
| 282 | Q |
| 299 | G |
| 309 | R |
| 316 | T |
| 319-320 | DG |
| 323 | G |
| 326-327 | QD |
| 329 | A |

[0202] Similarly, conserved amino acid sequences of SEQ ID NO 611 to 621 cover a subset of the imine reductases SEQ ID NO 300-598 identified by the inventors.

TABLE 2
Amino acid sequences of the conserved amino acid sequences of SEQ ID
NO 611 to 621, wherein each occurrence of X represents an amino acid or a gap.

| SEQ | |
|---|---|
| ID | |
| NO | amino acid sequence |
| 611 | GXKXGXXXXXXXXGXKXGGXXPXNXXXXXXXNHQSXXXLFXXXXGXXXXXXXXN |
| | XXTAXRTAAXXXXSXXXLXXXXXXXXGXXGAGXQXXXQXXXXXXXXXXXXXXXWN |
| | XXXXXXXXXXXXXXXXXXXXXXXXXXXXXXXXXXXXXXXSXXXXXXXXXXXXXXXH |
| | XXXMGTDTXXKXEXXXXXXXXXXXXXDXXXQXXXXGEXQXXXXXXXXXXXXXXXX |
| | GXXXXXXXXXRXXXXXXTXXDGXGXXXQDXA |
| 612 | MXXXXAXNFPVXREXIGXXXALYGFKXGFDXXXXXLGXKXGGXWPXNXXXXXXNH |
| | QSXXXLFXXXXGXXXXXVGGNXLTAXRTAAXXXXSIXXLAXXXXXXXGXXGAGXQX |
| | XFQXXAAXXXXXXEXXXXWNXXXXXXXXXXXXXXXXXXPFXXVXXXXXXXXXDVX |
| | XXITSXXXXXXXXXXXXXXTHXAXMGTDTXGKQEXXXXXXXXAXXFTDXXXQXXXX |
| | GEXQHAXXXXXXXXXXXXXXGXVXXXXXXXRXXXXXXTXXDGXGVXLQDLAVAXX |
| | XXXXA |
| 613 | EXXXXXXXXXXXXFXAXEXVFXXMAXXXAXNFPVVREXIGHXXALYGFKXGFDXXX |
| | XXLGXKXGGXWPXNXXXXXXNHQSTVXLFDXXXGXXXAXVGGNXLTAXRTAAXSA |
| | VSIXXLAXXXAKXLGXXGAGXQXXFQXXAAXXXXXXEXVXXWNXXPXXLXXLXXXX |
| | XXXXXPFEXVXXXXLXXXXDVIXXITSXXXXXLXXXXXXXXTHXAXMGTDTXGKQEX |
| | XXXXXXXAXXFTDXXXQXXXIGEXQHAXXXXXXXXXXXXXXGXVXXXXXXXRXXXX |
| | XXTXXDGXGVGLQDLAVAXXXXXXA |
| 614 | MAXXXAXNFPVXREAIGXXDALYGFKXGFDXXXXXLGXKXGGXWPXNXXXXLXNH |
| | QSXXXLFDXDXGXXXXXVGGNXLTAXRTAAXXXXSIXXLAXXXAXVXGMIGAGHQX |
| | XFQXRAAXXXXXFEXXXXWNXHPXXXXXXXXXXXEXXXPFXXVXXXXXXXEXDVX |
| | XXITSXFXXXXXXXXXXXXTHXAXMGTDTXGKQEXXXXLXXXAXXFTDEXAQXXXX |
| | GEXQHAXXXXXXXXXXXXXXGXVXXGXXXGRXXXXXXTXFDGTGVXLQDLAVAXX |
| | XVXXA |
| 615 | MXXXXAXNFPVXREXIGXXXALYGFKXGFDXXXXXLGXKXGGXWPXNXXXXXXNH |
| | QSXXFLFXXDXGXXXAXVGGNXLTAXRTAAXSXXSIXXLAXXXXKVXGMXGAGHQ |
| | XXFQXXAAXXXXXFEKXXXWNXXXXXLXXLXXXAXXXXXPFXXVXXXXXXXXXDVI |
| | XXITSXFXXXXXXXXXXXXTHXAXMGTDTXGKQEXXXXLXXXAXXFTDEXXQXXXI |
| | GEXQHAXXXXXXXXXXXXXXGXVXXGXXXGRXXXXXXTXXDGXGVXLQDLAVAX |
| | XXXXXA |
| 616 | MXXXXAXNFPVXREAIGXXDALYGFKXGFDXXXXXLGXKXGGXWPXNXXXXXXNH |
| | QSXXXLFXXDXGXXXXXVGGNXLTAXRTAAXSXXSIXXLAXXXXKVXGMXGAGHQ |
| | XXFQXRAAXXXXXFEKXXXWNXXXXXXXXLXXXXXEXXXPFXXVXXXXXXXXXDVI |
| | XXITSXFXXXXXXXXXXXXTHXAXMGTDTXGKQEXXXXLXXXAXXFTDEXAQXXXI |
| | GEXQHAXXXXXXXXXXXXXXGXVXXGXXXGRXXXXXXTXFDGTGVXLQDLAVAXX |
| | XXXXA |
| 617 | MXXVXEXXIXGLMXPXAAFXAXEXXFAXMXXXXAXNFPVVREAXGXXDALYGFKG |
| | GFDXXXXXLGLKAGGYWPXNXXXXXINHQSTXFLFDXDXGRXXAAXGGNLLTALR |
| | TAAASAVSXKXLAPXGAXVLGMIGAGHQSXFQMXAXXXXXXFXXVXGWNPHPXML |
| | XRLXXTAXXLGLPFEAVXLXXLGXXADVIXXITSXFXXLLXXXHVXGXTHXAAMGTD |
| | TKGKQELDXXLVXRXXXXTDEXAQXXXIGEXQHXXAXXXXXXXXXXXXGXXXXGX |
| | XXGRXXXXXTXFDGTGVGLQDLAVAXXXXXXAXXXGXA |
| 618 | MXVVXEKXIAGLMXPXAAFEAIEAXFAXMARRXAXNFPVVREAIGXXDALYGFKGG |
| | FDXXXLXLGLKAGGYWPXNQXXXLINHQSTVFLFDPDXGRXXAAXGGNLLTALRTA |
| | AASAVSIKXLAPXGAKVLGMIGAGHQSXFQMRAXAXVHXFEKVIGWNPHPEMLXRL |
| | XXTAXXLGLPFEAVXLXXLGXEADVIXSITSXFXXLLXXXHVKGPTHXAAMGTDTKG |
| | KQELDXXLVXRARXXTDEXAQSXXIGEXQHAXAXXLIXXXXXXEXGAVVXGXXXGR |
| | XXAEVTXFDGTGVGLQDLAVAXXXXEXAKXXGXAXXVE |
| 619 | MXVVAEKEIAGLMTPEAAFEAIEAXFASMARRKAYNFPVVREAIGHEDALYGFKGG |
| | FDAXALXLGLKAGGYWPXNQKHXLINHQSTVFLFDPDTGRXXAAXGGNLLTALRTA |
| | AASAVSIKXLAPXGAKVLGMIGAGHQSAFQMRAXAXVHXFEKVIGWNPHPEMLXRL |
| | AXTAAXLGLPFEAVXLXRLGXEADVIXSITSSFSPLLXXXHVKGPTHXAAMGTDTKG |
| | KQELDPALVARARXFTDEVAQSVXIGECQHAIAXXLIXEXXXGEXGAVVXGDXPGR |
| | XXAEVTXFDGTGVGLQDLAVAXXVXEXAKXXGXAQXVEI |
| 620 | MLVVAEKEIAGLMTPEAAFEAIEAVFASMARRKAYNFPVVREAIGHEDALYGFKGG |
| | FDAXALXLGLKAGGYWPXNQKHXLINHQSTVFLFDPDTGRVSAAVGGNLLTALRTA |
| | AASAVSIKXLAPKGAKVLGMIGAGHQSAFQMRAAANVHRFEKVIGWNPHPEMLXR |
| | LADTAAELGLPFEAVXLXRLGXEADVIXSITSSFSPLLXXXHVKGPTHXAAMGTDTK |
| | GKQELDPALVARARXFTDEVAQSVSIGECQHAIAXXLIXEXQXGEXGAVVAGDXPG |
| | RGDAEVTXFDGTGVGLQDLAVAXXVXEXAKXXGXAQEVEI |
| 621 | MLVVAEKEIAGLMTPEAAFEAlEAVFASMARRKAYNFPVVREAIGHEDALYGFKGG |
| | FDASALXLGLKAGGYWPNNQKHNLINHQSTVFLFDPDTGRVSAAVGGNLLTALRTA |
| | AASAVSIKYLAPKGAKVLGMIGAGHQSAFQMRAAANVHRFEKVIGWNPHPEMLSR |
| | LADTAAELGLPFEAVELDRLGXEADVIXSITSSFSPLLMXXHVKGPTHXAAMGTDTK |
| | GKQELDPALVARARXFTDEVAQSVSIGECQHAIAXGLIREDQXGEXGAVVAGDXPG |
| | RGDAEVTIFDGTGVGLQDLAVAXAVVELAKHKGVAQEVEI |

[0203] Preferably, the method of preparing a primary amine compound of general formula (IB) comprises the steps of:
[0204] A1) Providing an imine compound of general formula (IIA); and
[0205] B1) Reacting imine compound of general formula (IIA) with a polypeptide having the enzymatic activity of an imine reductase in the presence of a cofactor, to afford primary amine of general formula (IB),
   wherein the polypeptide comprises a conserved amino acid sequence selected from the sequences as set forth in SEQ ID NO 611 to 621, wherein R¹ and R² have the meanings as defined herein.

[0206] More preferably, the method of preparing a primary amine compound of general formula (IB) comprises the steps of:
[0207] A1) Providing an imine compound of general formula (IIA); and
[0208] B1) Reacting imine compound of general formula (IIA) with a polypeptide having the enzymatic activity of an imine reductase in the presence of a cofactor, to afford primary amine of general formula (IB),
   wherein the polypeptide comprises the conserved amino acid sequence as set forth in SEQ ID NO 611, wherein R¹ and R² have the meanings as defined herein.

[0209] More preferably, the method of preparing a primary amine compound of general formula (IB) comprises the steps of:
[0210] A1) Providing an imine compound of general formula (IIA); and
[0211] B1) Reacting imine compound of general formula (IIA) with a polypeptide having the enzymatic activity of an imine reductase in the presence of a cofactor, to afford primary amine of general formula (IB),
   wherein the polypeptide comprises the conserved amino acid sequence as set forth in SEQ ID NO 612, wherein R¹ and R² have the meanings as defined herein.

[0212] More preferably, the method of preparing a primary amine compound of general formula (IB) comprises the steps of:
[0213] A1) Providing an imine compound of general formula (IIA); and
[0214] B1) Reacting imine compound of general formula (IIA) with a polypeptide having the enzymatic activity of an imine reductase in the presence of a cofactor, to afford primary amine of general formula (IB),
   wherein the polypeptide comprises the conserved amino acid sequence as set forth in SEQ ID NO 617, wherein R¹ and R² have the meanings as defined herein.

[0215] More preferably, the method of preparing a primary amine compound of general formula (IB) comprises the steps of:
[0216] A1) Providing an imine compound of general formula (IIA); and
[0217] B1) Reacting imine compound of general formula (IIA) with a polypeptide having the enzymatic activity of an imine reductase in the presence of a cofactor, to afford primary amine of general formula (IB),
   wherein the polypeptide comprises the conserved amino acid sequence as set forth in SEQ ID NO 618, wherein R¹ and R² have the meanings as defined herein.

[0218] More preferably, the method of preparing a primary amine compound of general formula (IB) comprises the steps of:
[0219] A1) Providing an imine compound of general formula (IIA); and
[0220] B1) Reacting imine compound of general formula (IIA) with a polypeptide having the enzymatic activity of an imine reductase in the presence of a cofactor, to afford primary amine of general formula (IB),
   wherein the polypeptide comprises the conserved amino acid sequence as set forth in SEQ ID NO 619, wherein R¹ and R² have the meanings as defined herein.

[0221] More preferably, the method of preparing a primary amine compound of general formula (IB) comprises the steps of:
[0222] A1) Providing an imine compound of general formula (IIA); and
[0223] B1) Reacting imine compound of general formula (IIA) with a polypeptide having the enzymatic activity of an imine reductase in the presence of a cofactor, to afford primary amine of general formula (IB),
   wherein the polypeptide comprises the conserved amino acid sequence as set forth in SEQ ID NO 620, wherein R¹ and R² have the meanings as defined herein.

[0224] Most preferably, the method of preparing a primary amine compound of general formula (IB) comprises the steps of:
[0225] A1) Providing an imine compound of general formula (IIA); and
[0226] B1) Reacting imine compound of general formula (IIA) with a polypeptide having the enzymatic activity of an imine reductase in the presence of a cofactor, to afford primary amine of general formula (IB),
   wherein the polypeptide comprises the conserved amino acid sequence as set forth in SEQ ID NO 621, wherein R¹ and R² have the meanings as defined herein.

[0227] In one embodiment of the invention, the polypeptide of step A1) of the inventive method comprises an amino acid sequence of preferably at least 80%, more preferably at least 85%, more preferably at least 87%, more preferably at least 90%, more preferably at least 92%, more preferably at least 95%, more preferably at least 96%, more preferably at least 97%, even more preferably at least 98%, even more preferably at least 99% and even more preferably 100% sequence identity to an amino acid sequence selected from SEQ ID Nos.: 300-598.

[0228] Thus, the present invention is directed to a method of preparing a primary amine compound of general formula (IB), comprising the steps of:
[0229] A1) Providing an imine compound of general formula (IIA); and
[0230] B1) Reacting imine compound of general formula (IIA) with a polypeptide having the enzymatic activity of an imine reductase in the presence of a cofactor, to afford primary amine of general formula (IB),
   wherein the polypeptide comprises a conserved amino acid as set forth in SEQ ID NO: 610; wherein R¹ and R² have the meanings as defined herein, and
   wherein the polypeptide comprises an amino acid sequence of at least 80% sequence identity to an amino acid sequence selected from SEQ ID Nos.: 300-598.

[0231] Moreover, the present invention is directed to a method of preparing a primary amine compound of general formula (IB), comprising the steps of:
[0232] A1) Providing an imine compound of general formula (IIA); and
[0233] B1) Reacting imine compound of general formula (IIA) with a polypeptide having the enzymatic activity of an imine reductase in the presence of a cofactor, to afford primary amine of general formula (IB),
   wherein the polypeptide comprises a conserved amino acid sequence as set forth in SEQ ID NO: 610; wherein R¹ and R² have the meanings as defined herein, and
   wherein the polypeptide consists of an amino acid sequence selected from SEQ ID Nos.: 300-598.

[0234] In another embodiment of the present invention, the polypeptide of step A1) of the inventive method comprises an amino acid sequence of preferably at least 80%, more preferably at least 85%, more preferably at least 87%, more preferably at least 90%, more preferably at least 92%, more preferably at least 95%, more preferably at least 96%, more preferably at least 97%, even more preferably at least 98%, even more preferably at least 99% and even more preferably 100% sequence identity to an amino acid sequence selected from SEQ ID Nos.: 300, 306, 321, 324, 325, 338, 346, 357, 374, 422, 434 and 459. Preferably, the polypeptide of step A1) of the inventive method consists of an amino acid sequence selected from SEQ ID Nos.: 300, 306, 321, 324, 325, 338, 346, 357, 374, 422, 434 and 459.

[0235] Thus, the present invention is directed to a method of preparing a primary amine compound of general formula (IB), comprising the steps of:
[0236] A1) Providing an imine compound of general formula (IIA); and
[0237] B1) Reacting imine compound of general formula (IIA) with a polypeptide having the enzymatic activity of an imine reductase in the presence of a cofactor, to afford primary amine of general formula (IB),
   wherein the polypeptide comprises a conserved amino acid sequence as set forth in SEQ ID NO: 610; wherein R¹ and R² have the meanings as defined herein, and
   wherein the polypeptide consists of an amino acid sequence selected from SEQ ID Nos.: 300, 306, 321, 324, 325, 338, 346, 357, 374, 422, 434 and 459.

[0238] The present invention is also directed to a method of preparing a primary amine compound of general formula (IB), comprising the steps of:
[0239] A1) Providing an imine compound of general formula (IIA); and
[0240] B1) Reacting imine compound of general formula (IIA) with a polypeptide having the enzymatic activity of an imine reductase in the presence of a cofactor, to afford primary amine of general formula (IB),
   wherein the polypeptide comprises a conserved amino acid sequence as set forth in SEQ ID NO: 610; wherein R¹ and R² have the meanings as defined herein, and
   wherein the polypeptide comprises an amino acid sequence of at least 80% sequence identity to an amino acid sequence selected from SEQ ID Nos.: 300, 306, 321, 324, 325, 338, 346, 357, 374, 422, 434 and 459.

[0241] In a further preferred embodiment of the present invention, the polypeptide of step A1) of the inventive method comprises an amino acid sequence of preferably at least 80%, more preferably at least 85%, more preferably at least 87%, more preferably at least 90%, more preferably at least 92%, more preferably at least 95%, more preferably at least 96%, more preferably at least 97%, even more preferably at least 98%, even more preferably at least 99% and even more preferably 100% sequence identity to an amino acid sequence of SEQ ID No.: 434. Preferably, the polypeptide of step A1) of the inventive method consists of an amino acid sequence of SEQ ID No.: 434.

[0242] Moreover, the present invention is directed to a method of preparing a primary amine compound of general formula (IB), comprising the steps of:
[0243] A1) Providing an imine compound of general formula (IIA); and
[0244] B1) Reacting imine compound of general formula (IIA) with a polypeptide having the enzymatic activity of an imine reductase in the presence of a cofactor, to afford primary amine of general formula (IB),
   wherein the polypeptide comprises a conserved amino acid sequence as set forth in SEQ ID NO: 610; wherein R¹ and R² have the meanings as defined herein; and
   wherein step B1) is performed at a substrate loading concentration of at least about 10 g/L, about 20 g/L, about 30 g/L, about 40 g/L, about 50 g/L, about 70 g/L, about 100 g/L, about 125 g/L, about 150 g/L, about 175 g/L or about 200 g/L or more with a percent conversion of at least about 40%, at least about 50%, at least about 60%, at least about 70%, at least about 80%, at least about 90%, at least about 95%, at least about 98%, or at least about 99%, in a reaction time of about 120 h or less, 72 h or less, about 48 h or less, about 36 h or less, or about 24 h less, under suitable reaction conditions.

[0245] In one embodiment, the method of preparing a primary amine compound of general formula (IB) further comprises a cofactor regeneration system capable of converting NADP⁺ to NADPH, or preferably NAD⁺ to NADH. Preferably, the cofactor regeneration systems comprises formate and formate dehydrogenase (FDH), glucose and glucose dehydrogenase (GDH), glucose-6-phosphate and glucose-6-phosphate dehydrogenase, a secondary alcohol and alcohol dehydrogenase or phosphate and phosphite dehydrogenase. Especially preferred is, when the cofactor regeneration systems comprises formate and formate dehydrogenase (FDH).

[0246] Thus, the present invention is directed to a method of preparing a primary amine compound of general formula (IB), comprising the steps of:
[0247] A1) Providing an imine compound of general formula (IIA); and
[0248] B1) Reacting imine compound of general formula (IIA) with a polypeptide having the enzymatic activity of an imine reductase in the presence of a cofactor, to afford primary amine of general formula (IB),
   wherein the polypeptide comprises a conserved amino acid sequence as set forth in SEQ ID NO: 610; wherein R¹ and R² have the meanings as defined herein, and
   wherein the cofactor is NADH.

[0249] Preferably, the method of preparing a primary amine compound of general formula (IB) comprises the steps of:
[0250] A1) Providing an imine compound of general formula (IIA); and
[0251] B1) Reacting imine compound of general formula (IIA) with a polypeptide having the enzymatic activity of an imine reductase in the presence of a cofactor, to afford primary amine of general formula (IB),
   wherein the polypeptide comprises a conserved amino acid sequence selected from the sequences as set forth in SEQ ID NO: 611 to 621, wherein R¹ and R² have the meanings as defined herein, and wherein the cofactor is NADH.

[0252] Preferably, the method of preparing a primary amine compound of general formula (IB) comprises the steps of:
[0253] A1) Providing an imine compound of general formula (IIA); and
[0254] B1) Reacting imine compound of general formula (IIA) with a polypeptide having the enzymatic activity of an imine reductase in the presence of a cofactor, to afford primary amine of general formula (IB),
   wherein the polypeptide comprises a conserved amino acid sequence as set forth in SEQ ID NO: 611, wherein R¹ and R² have the meanings as defined herein, and
   wherein the cofactor is NADH.

[0255] Preferably, the method of preparing a primary amine compound of general formula (IB) comprises the steps of:
[0256] A1) Providing an imine compound of general formula (IIA); and
[0257] B1) Reacting imine compound of general formula (IIA) with a polypeptide having the enzymatic activity of an imine reductase in the presence of a cofactor, to afford primary amine of general formula (IB),
   wherein the polypeptide comprises a conserved amino acid sequence as set forth in SEQ ID NO: 617, wherein R¹ and R² have the meanings as defined herein, and
   wherein the cofactor is NADH.

[0258] Preferably, the method of preparing a primary amine compound of general formula (IB) comprises the steps of:
[0259] A1) Providing an imine compound of general formula (IIA); and
[0260] B1) Reacting imine compound of general formula (IIA) with a polypeptide having the enzymatic activity of an imine reductase in the presence of a cofactor, to afford primary amine of general formula (IB),
   wherein the polypeptide comprises a conserved amino acid sequence as set forth in SEQ ID NO: 618, wherein R¹ and R² have the meanings as defined herein, and
   wherein the cofactor is NADH.

[0261] Preferably, the method of preparing a primary amine compound of general formula (IB) comprises the steps of:
[0262] A1) Providing an imine compound of general formula (IIA); and
[0263] B1) Reacting imine compound of general formula (IIA) with a polypeptide having the enzymatic activity of an imine reductase in the presence of a cofactor, to afford primary amine of general formula (IB),
   wherein the polypeptide comprises a conserved amino acid sequence as set forth in SEQ ID NO: 619, wherein R¹ and R² have the meanings as defined herein, and
   wherein the cofactor is NADH.

[0264] Preferably, the method of preparing a primary amine compound of general formula (IB) comprises the steps of:
[0265] A1) Providing an imine compound of general formula (IIA); and
[0266] B1) Reacting imine compound of general formula (IIA) with a polypeptide having the enzymatic activity of an imine reductase in the presence of a cofactor, to afford primary amine of general formula (IB),
   wherein the polypeptide comprises a conserved amino acid sequence as set forth in SEQ ID NO: 620, wherein R¹ and R² have the meanings as defined herein, and
   wherein the cofactor is NADH.

[0267] Preferably, the method of preparing a primary amine compound of general formula (IB) comprises the steps of:
[0268] A1) Providing an imine compound of general formula (IIA); and
[0269] B1) Reacting imine compound of general formula (IIA) with a polypeptide having the enzymatic activity of an imine reductase in the presence of a cofactor, to afford primary amine of general formula (IB),
   wherein the polypeptide comprises a conserved amino acid sequence as set forth in SEQ ID NO: 621, wherein R¹ and R² have the meanings as defined herein, and
   wherein the cofactor is NADH.

[0270] In case the primary imine compound of formula (IIA) is prochiral, a chiral amine of formula (IB) is formed (as indicated by the asterisk sign) by the inventive method. Thus, the polypeptides having the enzymatic activity of an imine reductase are capable of inducing stereoselectivity in the reduction of primary amines to imines as shown in FIG. 2C, thereby forming one stereocenter in a primary amine compound of formula (IB).

[0271] Thus, the present invention is also directed to a method of preparing a primary amine compound of general formula (IB), comprising the steps of:
[0272] A1) Providing an imine compound of general formula (IIA); and
[0273] B1) Reacting imine compound of general formula (IIA) with a polypeptide having the enzymatic activity of an imine reductase in the presence of a cofactor, to afford primary amine of general formula (IB),
   wherein the polypeptide comprises a conserved amino acid sequence as set forth in SEQ ID NO: 610; wherein R¹ and R² have the meanings as defined herein; and
   wherein the primary amine of general formula (IB) is formed as a single stereo-isomer.

[0274] It will be appreciated that the inventive method leads within its scope to all stereoisomers of the primary amine of general formula (IB). The term “(R) or (S) isomer” as used herein means that in formulae (I), (IA), (IB), (IC) and (V), the stereocenter which is marked with an asterisk, may be in (R) or (S) configuration. The (R) or (S) configuration is determined as follows. First, priorities are assigned to all substituents bonded to the carbon atom of the stereocenter according to the Cahn-Ingold-Prelog priority rules which have a well defined meaning in the art of organic chemistry. Second, the configuration of the stereocenter which is marked with an asterisk is determined based on the priority of the substituents bonded to the carbon atom of the stereocenter.

[0275] In some embodiments, (R)-configured primary amines are formed, provided that the amino group has the highest priority and R¹ is the higher priority substituent compared to R². Thus, the present invention is directed to a method of preparing a primary amine compound of general formula (R)-(IB)

[chemical structure]

wherein R¹ and R² are independently selected from a hydrogen atom, and optionally substituted alkyl, alkenyl, alkynyl, alkoxy, carboxy, aminocarbonyl, thiocarbonyl, heteroalkyl, heteroalkenyl, heteroalkynyl, carboxyalkyl, aminoalkyl, haloalkyl, alkylthioalkyl, cycloalkyl, aryl, arylalkyl, heterocycloalkyl, heteroaryl, and heteroarylalkyl; and optionally R¹ and R² are linked to form a 3-membered to 10-membered ring, and wherein the amino group has the highest priority of all substituents and R¹ is the higher priority substituent compared to R²;
comprising:
[0276] A1) Providing an imine compound of general formula (IIA)

[chemical structure]

[0277] wherein R¹ and R² have the meanings as defined above; and
[0278] B1) Reacting imine compound of general formula (IIA) with a polypeptide having the enzymatic activity of imine reductase in the presence of a cofactor, to afford primary amine of general formula (R)-(IB),
   wherein the polypeptide comprises a conserved amino acid sequence as set forth in SEQ ID NO: 610.

[0279] Preferably, the polypeptide comprises a conserved amino acid sequence selected from the sequences as set forth in SEQ ID NO: 611 to 621. More preferably, the polypeptide comprises a conserved amino acid sequence as set forth in SEQ ID NO 611. More preferably, the polypeptide comprises a conserved amino acid sequence as set forth in SEQ ID NO 617. More preferably, the polypeptide comprises a conserved amino acid sequence as set forth in SEQ ID NO 618. More preferably, the polypeptide comprises a conserved amino acid sequence as set forth in SEQ ID NO 619. More preferably, the polypeptide comprises a conserved amino acid sequence as set forth in SEQ ID NO 620. More preferably, the polypeptide comprises a conserved amino acid sequence as set forth in SEQ ID NO 621.

[0280] In some embodiments, (S)-configured primary amines are formed, provided that the amino group has the highest priority and R² is the higher priority substituent compared to R¹. Thus, the present invention is directed to a method of preparing a primary amine compound of general formula (S)-(IB)

[chemical structure]

wherein R¹ and R² are independently selected from a hydrogen atom, and optionally substituted alkyl, alkenyl, alkynyl, alkoxy, carboxy, aminocarbonyl, thiocarbonyl, heteroalkyl, heteroalkenyl, heteroalkynyl, carboxyalkyl, aminoalkyl, haloalkyl, alkylthioalkyl, cycloalkyl, aryl, arylalkyl, heterocycloalkyl, heteroaryl, and heteroarylalkyl; and optionally R¹ and R² are linked to form a 3-membered to 10-membered ring, and wherein the amino group has the highest priority of all substituents and R² is the higher priority substituent compared to R¹;
comprising:
[0281] A1) Providing an imine compound of general formula (IIA)

[chemical structure]

[0282] wherein R¹ and R² have the meanings as defined above; and
[0283] B1) Reacting imine compound of general formula (IIA) with a polypeptide having the enzymatic activity of an imine reductase in the presence of a cofactor, to afford primary amine of general formula (S)-(IB),
   wherein the polypeptide comprises a conserved amino acid sequence as set forth in SEQ ID NO: 610.

[0284] Further, the present invention is directed to a method of preparing a primary amine compound of general formula (IB), comprising the steps of:
[0285] A1) Providing an imine compound of general formula (IIA); and
[0286] B1) Reacting imine compound of general formula (IIA) with a polypeptide having the enzymatic activity of an imine reductase in the presence of a cofactor, to afford primary amine of general formula (IB),
   wherein the polypeptide comprises a conserved amino acid sequence as set forth in SEQ ID NO: 610; wherein R¹ and R² have the meanings as defined herein; and
   wherein the primary amine of general formula (IB) is a chiral amine formed in an enantiomeric excess or diastereomeric excess of greater than 90%, 91%, 92%, 93%, 94%, 95%, 96%, 97%, 98%, 99%, 99.5%, or greater.

[0287] The imine reductases used in the inventive method of preparing primary amines also catalyze the reduction of chiral or pro-chiral imines or even more precisely of chiral or pro-chiral primary imines to the corresponding chiral primary amines, as illustrated in FIG. 2C, but do not catalyze the reaction of a chiral or pro-chiral secondary imine to the corresponding chiral secondary amine and also not the reductive amination of a chiral or pro-chiral carbonyl compound and an amine substrate to the corresponding chiral tertiary amine as illustrated in FIG. 2A.

[0288] The term “chiral imine” or “chiral primary imine” refers to an imine of general formula (IIA), wherein the substituent R¹ and/or R² is/are chiral, i.e. comprise at least one stereogenic center so that primary amines are obtained having an additional stereogenic center at the carbon atom attached to the amine nitrogen atom as shown in general formula (IB).

[0289] The term “pro-chiral imine” or “pro-chiral primary imine” refers to an imine of general formula (IIA), wherein the substituents R¹ and R² are different from each other but not chiral, i.e. neither the substituent R¹ nor the substituent R² comprises a stereogenic center so that primary amines are obtained having exactly one stereogenic center at the carbon atom attached to the amine nitrogen atom as shown in general formula (IB).

[0290] In one embodiment of the present invention, the imine compound and even more precisely the primary imine compound of general formula (IIA) in step A1) is formed in-situ by reacting a ketone or an aldehyde with ammonia or an ammonium salt. Thus, the present invention is also directed to a method of preparing a primary amine compound of general formula (IB), comprising the steps of:
[0291] A2) Providing a carbonyl compound of general formula (III) and ammonia or an ammonium salt

[chemical structure]

[0292] B2) Reacting the carbonyl compound of general formula (III) with ammonia or an ammonium salt in the presence of a polypeptide having the enzymatic activity of an imine reductase and a cofactor, to afford primary amine of general formula (IB),
   wherein the polypeptide comprises a conserved amino acid sequence of GXKXGX₈GXKXGGX₂PXNX₇NHQSX₃LFX₄GX₈NX₂TAXRTAAX₄SX₃LX₈GX₂GAGXQ X₃QX₁₅WNX₃₉SX₁₅HX₃MGTDTX₂KXEX₁₃DX₃QX₄GEXQX₁₆GX₉RX₆TX₂DGXGX₃QDX A (SEQ ID NO: 610), and wherein R¹ and R² have the meanings as defined herein. Preferably, the polypeptide comprises a conserved amino acid sequence selected from the sequences as set forth in SEQ ID NO: 611 to 621. More preferably, the polypeptide comprises a conserved amino acid sequence as set forth in SEQ ID NO 617. More preferably, the polypeptide comprises a conserved amino acid sequence as set forth in SEQ ID NO 618. More preferably, the polypeptide comprises a conserved amino acid sequence as set forth in SEQ ID NO 619. More preferably, the polypeptide comprises a conserved amino acid sequence as set forth in SEQ ID NO 620. More preferably, the polypeptide comprises a conserved amino acid sequence as set forth in SEQ ID NO 621.

[0293] Preferably, the ammonium salt is selected from ammonium chloride, ammonium bromide, ammonium formate or ammonium acetate.

[0294] Alternatively, the present invention is directed to a method of preparing a primary amine of general formula (IB) is formed by reacting a carbonyl compound with ammonia or an ammonium salt comprising the steps of:
[0295] A2) Providing a carbonyl compound of general formula (III)

[chemical structure]

[0296] and ammonia or an ammonium salt in order to form the primary imine of general formula (IIA);
[0297] B2) Reacting the formed primary imine of general formula (IIA) with a polypeptide having the enzymatic activity of an imine reductase and a cofactor to afford the primary amine of general formula (IB),
   [0298] wherein the polypeptide comprises a conserved amino acid sequence as set forth in SEQ ID NO: 610.

[0299] Alternatively, the present invention is directed to a method of preparing a primary amine of general formula (IB) is formed in-situ by reacting a carbonyl compound with ammonia or an ammonium salt comprising the steps of:
[0300] A2) Providing a carbonyl compound of general formula (III)

[chemical structure]

[0301] and ammonia or an ammonium salt in order to form in-situ the primary imine of general formula (IIA);
[0302] B2) Reacting the in-situ formed primary imine of general formula (IIA) with a polypeptide having the enzymatic activity of an imine reductase and a cofactor to afford the primary amine of general formula (IB),
   [0303] wherein the polypeptide comprises a conserved amino acid sequence as set forth in SEQ ID NO: 610.

[0304] Preferably, the polypeptide comprises a conserved amino acid sequence selected from the sequences as set forth in SEQ ID NO: 611 to 621. More preferably, the polypeptide comprises a conserved amino acid sequence as set forth in SEQ ID NO 617. More preferably, the polypeptide comprises a conserved amino acid sequence as set forth in SEQ ID NO 618. More preferably, the polypeptide comprises a conserved amino acid sequence as set forth in SEQ ID NO 619. More preferably, the polypeptide comprises a conserved amino acid sequence as set forth in SEQ ID NO 620. More preferably, the polypeptide comprises a conserved amino acid sequence as set forth in SEQ ID NO 621.

[0305] In one embodiment of the present invention, the polypeptide used in the inventive method is an engineered variant of the wild-type imine reductase polypeptide selected from SEQ ID NO: 300-598 that exhibits improved enzyme properties as compared to the naturally occurring imine reductase, including among others, imine reductase activity, substrate specificity, and selectivity and is still capable of catalyzing the reduction of an primary imine compound of formula (IIA) to a primary amine of formula (IB).

[0306] In one embodiment of the present invention the polypeptide used in the inventive method comprises the amino acid sequence selected from SEQ ID NO: 300-598, wherein the amino acid sequence can comprise deletions of one or more amino acids, 2 or more amino acids, 3 or more amino acids, 4 or more amino acids, 5 or more amino acids, 6 or more amino acids, 8 or more amino acids, 10 or more amino acids, 15 or more amino acids, or 20 or more amino acids, up to 10% of the total number of amino acids, up to 10% of the total number of amino acids, up to 20% of the total number of amino acids, or up to 30% of the total number of amino acids of the imine reductase polypeptides, where the associated functional activity and/or improved properties of the polypeptide having the enzymatic activity described herein is maintained. In some embodiments, the deletions can comprise 1-2, 1-3, 1-4, 1-5, 1-6, 1-7, 1-8, 1-9, 1-10, 1-15, 1-20, 1-21, 1-22, 1-23, 1-24, 1-25, 1-30, 1-35, 1-40, 1-45, or 1-50 amino acid residues. In some embodiments, the number of deletions can be 1, 2, 3, 4, 5, 6, 7, 8, 9, 10, 11, 12, 13, 14, 15, 16, 17, 18, 19, 20, 21, 22, 23, 24, 25, 30, 30, 35, 40, 45, or 50 amino acid residues. In some embodiments, the deletions can comprise deletions of 1, 2, 3, 4, 5, 6, 7, 8, 9, 10, 11, 12, 13, 14, 15, 16, 18, 20, 21, 22, 23, 24, or 25 amino acid residues.

[0307] In one embodiment of the present invention the polypeptide used in the inventive method comprises the amino acid sequence selected from SEQ ID NO: 300, 306, 321, 324, 325, 338, 346, 357, 374, 422, 434 and 459, wherein the amino acid sequence can comprise deletions of one or more amino acids, 2 or more amino acids, 3 or more amino acids, 4 or more amino acids, 5 or more amino acids, 6 or more amino acids, 8 or more amino acids, 10 or more amino acids, 15 or more amino acids, or 20 or more amino acids, up to 10% of the total number of amino acids, up to 10% of the total number of amino acids, up to 20% of the total number of amino acids, or up to 30% of the total number of amino acids of the imine reductase polypeptides, where the associated functional activity and/or improved properties of the polypeptide having the enzymatic activity described herein is maintained. In some embodiments, the deletions can comprise 1-2, 1-3, 1-4, 1-5, 1-6, 1-7, 1-8, 1-9, 1-10, 1-15, 1-20, 1-21, 1-22, 1-23, 1-24, 1-25, 1-30, 1-35, 1-40, 1-45, or 1-50 amino acid residues. In some embodiments, the number of deletions can be 1, 2, 3, 4, 5, 6, 7, 8, 9, 10, 11, 12, 13, 14, 15, 16, 17, 18, 19, 20, 21, 22, 23, 24, 25, 30, 30, 35, 40, 45, or 50 amino acid residues. In some embodiments, the deletions can comprise deletions of 1, 2, 3, 4, 5, 6, 7, 8, 9, 10, 11, 12, 13, 14, 15, 16, 18, 20, 21, 22, 23, 24, or 25 amino acid residues.

[0308] In one embodiment of the present invention the polypeptide used in the inventive method comprises the amino acid sequence of SEQ ID NO: 434, wherein the amino acid sequence can comprise deletions of one or more amino acids, 2 or more amino acids, 3 or more amino acids, 4 or more amino acids, 5 or more amino acids, 6 or more amino acids, 8 or more amino acids, 10 or more amino acids, 15 or more amino acids, or 20 or more amino acids, up to 10% of the total number of amino acids, up to 10% of the total number of amino acids, up to 20% of the total number of amino acids, or up to 30% of the total number of amino acids of the imine reductase polypeptides, where the associated functional activity and/or improved properties of the polypeptide having the enzymatic activity described herein is maintained. In some embodiments, the deletions can comprise 1-2, 1-3, 1-4, 1-5, 1-6, 1-7, 1-8, 1-9, 1-10, 1-15, 1-20, 1-21, 1-22, 1-23, 1-24, 1-25, 1-30, 1-35, 1-40, 1-45, or 1-50 amino acid residues. In some embodiments, the number of deletions can be 1, 2, 3, 4, 5, 6, 7, 8, 9, 10, 11, 12, 13, 14, 15, 16, 17, 18, 19, 20, 21, 22, 23, 24, 25, 30, 30, 35, 40, 45, or 50 amino acid residues. In some embodiments, the deletions can comprise deletions of 1, 2, 3, 4, 5, 6, 7, 8, 9, 10, 11, 12, 13, 14, 15, 16, 18, 20, 21, 22, 23, 24, or 25 amino acid residues.

[0309] In one embodiment of the present invention the polypeptide used in the inventive method comprises the amino acid sequence selected from SEQ ID NO: 300-598, wherein the amino acid sequence can comprise insertions of one or more amino acids, 2 or more amino acids, 3 or more amino acids, 4 or more amino acids, 5 or more amino acids, 6 or more amino acids, 8 or more amino acids, 10 or more amino acids, 15 or more amino acids, 20 or more amino acids, 30 or more amino acids, 40 or more amino acids, or 50 or more amino acids, where the associated functional activity and/or improved properties of the polypeptide having the enzymatic activity of an imine reductase described herein is maintained. The insertions can be to amino or carboxy terminus, or internal portions of the imine reductase polypeptide.

[0310] In one embodiment of the present invention the polypeptide used in the inventive method comprises the amino acid sequence selected from SEQ ID NO: 300-598, wherein the amino acid sequence has optionally 1-2, 1-3, 1-4, 1-5, 1-6, 1-7, 1-8, 1-9, 1-10, 1-15, 1-20, 1-21, 1-22, 1-23, 1-24, 1-25, 1-30, 1-35, 1-40, 1-45, or 1-50 amino acid residue deletions, insertions and/or substitutions. In some embodiments, the number of amino acid sequence has optionally 1, 2, 3, 4, 5, 6, 7, 8, 9, 10, 11, 12, 13, 14, 15, 16, 17, 18, 19, 20, 21, 22, 23, 24, 25, 30, 30, 35, 40, 45, or 50 amino acid residue deletions, insertions and/or substitutions. In some embodiments, the amino acid sequence has optionally 1, 2, 3, 4, 5, 6, 7, 8, 9, 10, 11, 12, 13, 14, 15, 16, 18, 20, 21, 22, 23, 24, or 25 amino acid residue deletions, insertions and/or substitutions.

[0311] In some embodiments, the polypeptides used in the inventive method can be in the form of fusion polypeptides in which the engineered polypeptides are fused to other polypeptides, such as, by way of example and not limitation, antibody tags (e.g., myc epitope), purification sequences (e.g., His tags for binding to metals), and cell localization signals (e.g., secretion signals). Thus, the engineered polypeptides described herein can be used in the inventive method with or without fusions to other polypeptides.

[0312] It is to be understood that the polypeptides described herein are not restricted to the genetically encoded amino acids. In addition to the genetically encoded amino acids, the polypeptides described herein may be comprised, either in whole or in part, of naturally-occurring and/or synthetic non-encoded amino acids. Therefore, the polypeptides used in the inventive method may comprise non-encoded amino acids selected from the group comprising or consisting of: the D-stereomers of the genetically-encoded amino acids, 2,3-diaminopropionic acid (Dpr), α-aminoisobutyric acid (Aib), ε-aminohexanoic acid (Aha), δ-aminovaleric acid (Ava), N-methylglycine or sarcosine (MeGly or Sar), ornithine (Orn), citrulline (Cit), t-butylalanine (Bua), t-butylglycine (Bug), N-methylisoleucine (Melle), phenylglycine (Phg), cyclohexyl-alanine (Cha), norleucine (Nle), naphthylalanine (Nal), 2-chlorophenylalanine (Ocf), 3-chlorophenylalanine (Mcf), 4-chlorophenylalanine (Pcf), 2-fluorophenylalanine (Off), 3-fluorophenylalanine (Mff), 4-fluorophenylalanine (Pff), 2-bromophenylalanine (Obf), 3-bromophenylalanine (Mbf), 4-bromophenylalanine (Pbf), 2-methylphenylalanine (Omf), 3-methylphenylalanine (Mmf), 4-methylphenylalanine (Pmf), 2-nitrophenyl-alanine (Onf), 3-nitrophenylalanine (Mnf), 4-nitrophenylalanine (Pnf), 2-cyanophenyl-alanine (Ocf), 3-cyanophenylalanine (Mcf), 4-cyanophenylalanine (Pcf), 2-trifluoro-methylphenylalanine (Otf), 3-trifluoromethylphenylalanine (Mtf), 4-trifluoromethyl-phenylalanine (Ptf), 4-aminophenylalanine (Paf), 4-iodophenylalanine (Pif), 4-amino-methylphenylalanine (Pamf), 2,4-dichlorophenylalanine (Opef), 3,4-dichloro-phenylalanine (Mpcf), 2,4-difluorophenylalanine (Opff), 3,4-difluorophenylalanine (Mpff), pyrid-2-ylalanine (2pAla), pyrid-3-ylalanine (3pAla), pyrid-4-ylalanine (4pAla), naphth-1-ylalanine (1nAla), naphth-2-ylalanine (2nAla), thiazolylalanine (taAla), benzothienylalanine (bAla), thienylalanine (tAla), furylalanine (fAla), homophenylalanine (hPhe), homotyrosine (hTyr), homotryptophan (hTrp), penta-fluorophenylalanine (5ff), styrylkalanine (sAla), authrylalanine (aAla), 3,3-diphenyl-alanine (Dfa), 3-amino-5-phenypentanoic acid (Afp), penicillamine (Pen), 1,2,3,4-tetrahydroisoquinoline-3-carboxylic acid (Tic), β-2-thienylalanine (Thi), methionine sulfoxide (Mso), N(w)-nitroarginine (nArg), homolysine (hLys), phosphonomethylphenylalanine (pmPhe), phosphoserine (pSer), phosphothreonine (pThr), homoaspartic acid (hAsp), homoglutanic acid (hGlu), 1-aminocyclopent-(2)-ene-4 carboxylic acid, 1-aminocyclopent-(3)-ene-4 carboxylic acid, pipecolic acid (PA), azetidine-3-carboxylic acid (ACA), 1-aminocyclopentane-3-carboxylic acid, allylglycine (aOly), propargylglycine (pgGly), homoalanine (hAla), norvaline (nVal), homoleucine (hLeu), homovaline (hVal), homoisoleucine (hIle), homoarginine (hArg), N-acetyl lysine (AcLys), 2,4-diaminobutyric acid (Dbu), 2,3-diaminobutyric acid (Dab), N-methylvaline (MeVal), homocysteine (hCys), homoserine (hSer), hydroxyproline (Hyp) and homoproline (hPro). Those of skill in the art will recognize that amino acids or residues bearing side chain protecting groups may also comprise the polypeptides used in the inventive method. Non-limiting examples of such protected amino acids, which in this case belong to the aromatic category, include (protecting groups listed in parentheses), but are not limited to: Arg(tos), Cys(methylbenzyl), Cys (nitropyridinesulfenyl), Glu(b-benzylester), Gln(xanthyl), Asn(N-b-xanthyl), His(bom), His(benzyl), His(tos), Lys(fmoc), Lys(tos), Ser(O-benzyl), Thr (O-benzyl) and Tyr(O-benzyl). Non-encoding amino acids that are conformationally constrained of which the polypeptides described herein may be composed include, but are not limited to, N-methyl amino acids (D-configuration), 1-aminocyclopent-(2)-ene-4-carboxylic acid, 1-aminocyclopent-(3)-ene-4-carboxylic acid, pipecolic acid, azetidine-3-carboxylic acid, homoproline (hPro) and 1-aminocyclopentane-3-carboxylic acid.

[0313] In some embodiments, the polypeptides having the enzymatic activity of an imine reductase are used in the inventive method in various forms, for example, such as an isolated preparation, as a substantially purified enzyme, whole cells transformed with gene(s) encoding the enzyme, and/or as cell extracts and/or lysates of such cells. The enzymes can be lyophilized, spraydried, precipitated or be in the form of a crude paste.

[0314] In some embodiments, the polypeptides used in the inventive method are provided on a solid support, such as a membrane, resin, solid carrier, or other solid phase material. A solid support can be composed of organic polymers such as polystyrene, polyethylene, polypropylene, polyfluoroethylene, polyethyleneoxy, and polyacrylamide, as well as co-polymers and grafts thereof. A solid support can also be inorganic, such as glass, silica, controlled pore glass (CPG), reverse phase silica or metal, such as gold or platinum. The configuration of a solid support can be in the form of beads, spheres, particles, granules, a gel, a membrane or a surface. Surfaces can be planar, substantially planar, or non-planar. Solid supports can be porous or non-porous, and can have swelling or non-swelling characteristics. A solid support can be configured in the form of a well, depression, or other container, vessel, feature, or location.

[0315] In some embodiments, the polypeptides used in the inventive method are immobilized on a solid support such that they retain their activity, stereoselectivity, and/or other properties. In such embodiments, the immobilized polypeptides can facilitate the reduction of an imine compound of formula (IIA) to a primary amine compound of formula (IB), and after the reaction is complete the immobilized polypeptides are easily retained (e.g., by retaining beads on which polypeptide is immobilized) and then reused or recycled in subsequent reactions. Such immobilized biocatalytic processes allow for further efficiency and cost reduction.

[0316] Accordingly, the present invention is further directed to a method of preparing a primary amine compound of general formula (IB), comprising the steps of:
[0317] A1) Providing an imine compound of general formula (IIA); and
[0318] B1) Reacting imine compound of general formula (IIA) with a polypeptide having the enzymatic activity of an imine reductase in the presence of a cofactor, to afford primary amine of general formula (IB),
   wherein the polypeptide comprises the conserved amino acid sequence of GXKXGX₈GXKXGGX₂PXNX₇NHQSX₃LFX₄GX₈NX₂TAXRTAAX₄SX₃LX₈GX₂GAGXQ X₃QX₁₅WNX₃₉SX₁₅HX₃MGTDTX₂KXEX₁₃DX₃QX₄GEXQX₁₆GX₉RX₆TX₂DGXGX₃QDX A (SEQ ID NO: 610), wherein R¹ and R² have the meanings as defined herein; and wherein the polypeptide is bound or immobilized on a solid support.

[0319] Methods of enzyme immobilization are well-known in the art. The polypeptides can be bound non-covalently or covalently. Various methods for conjugation and immobilization of enzymes to solid supports (e.g., resins, membranes, beads, glass, etc.) are well known in the art and described in e.g.,: Yi et al., Process Biochemistry 2007, 42, 895; Martin et al., Applied Microbiology and Biotechnology 2007, 76, 843; Koszelewski et al., Journal of Molecular Catalysis B: Enzymatic, 2010, 63, 39; Truppo et al., Org. Process Res. Dev., 2011, 15, 1033; Hermanson, G. T., Bioconjugate Techniques, Second Edition, Academic Press (2008); Mateo et al., Biotechnology Progress, 2002, 18, 629; and Bioconjugation Protocols: Strategies and Methods, In Methods in Molecular Biology, C. M. Niemeyer ed., Humana Press (2004). Solid supports useful for immobilizing the polypeptides of the present invention include but are not limited to beads or resins comprising polymethacrylate with epoxide functional groups, polymethacrylate with amino epoxide functional groups, styrene/DVB copolymer or polymethacrylate with octadecyl functional groups. Exemplary solid supports useful for immobilizing the engineered imine reductase polypeptides of the present disclosure include, but are not limited to, chitosan beads, Eupergit C, and SEPABEADs (Mitsubishi), including the following different types of SEPABEAD: EC-EP, EC-HFA/S, EXA252, EXE119 and EXE120.

### Kits

[0320] The imine reductase polypeptides used in the inventive method of preparing primary amines can be provided in the form of kits. The enzymes in the kits may be present individually or as a plurality of enzymes. The kits can further include reagents for carrying out the enzymatic reactions, substrates for assessing the activity of enzymes, as well as reagents for detecting the products. The kits can also include reagent dispensers and instructions for use of the kits.

[0321] The kits described herein can include arrays comprising a plurality of different polypeptides having the enzymatic activity of an imine reductase at different addressable positions, wherein the different polypeptides are different variants of a reference sequence each having at least one different improved enzyme property. In some embodiments, a plurality of polypeptides immobilized on solid supports can be configured on an array at various locations, addressable for robotic delivery of reagents, or by detection methods and/or instruments. The array can be used to test a variety of substrate compounds for conversion by the polypeptides.

[0322] In one embodiment the kit for preparing a primary amine compound of general formula (IB) from amino alcohol compound of general formula (V)

[chemical structure]

wherein R¹ represents —COOH, R²* represents —C(OH)Z¹Z²
wherein Z¹ represents —H or —CH₃, and
Z² represents —H, —CH₃, —CH₂CH₃, —(CH₂)₂CH₃, —COOH, —CONH₂, —CH₂OH, —CH₂SH, —CH₂COOH or —CH₂CONH₂,
comprises:
[0323] a) a polypeptide comprising an amino acid sequence of at least 80% sequence identity to an amino acid sequence selected from SEQ ID NO: 300-598 which has the enzymatic activity of an imine reductase, and
[0324] b) a polypeptide comprising an amino acid sequence of SEQ ID NO: 602 which has the enzymatic activity of a β-hydroxyaspartate dehydratase.

[0325] In one embodiment the kit for preparing a primary amine compound of general formula (IB) comprises
[0326] a) a polypeptide comprising an amino acid sequence of at least 80% sequence identity to an amino acid sequence selected from SEQ ID NO: 300-598, which has the enzymatic activity of an imine reductase, and
[0327] b) a polypeptide comprising an amino acid sequence of at least 80% sequence identity to SEQ ID NO: 602 which has the enzymatic activity of a β-hydroxy-aspartate dehydratase.

[0328] In one embodiment the kit for preparing a primary amine compound of general formula (IB) comprises
[0329] a) a polypeptide comprising an amino acid sequence of at least 80% sequence identity to an amino acid sequence selected from SEQ ID NO: 300, 306, 321, 324, 325, 338, 346, 357, 374, 422, 434 and 459, which has the enzymatic activity of an imine reductase, and
[0330] b) a polypeptide comprising an amino acid sequence of at least 80% sequence identity to SEQ ID NO: 602 which has the enzymatic activity of a β-hydroxy-aspartate dehydratase.

[0331] In one embodiment the kit for preparing a primary amine compound of general formula (IB) comprises
[0332] a) a polypeptide comprising an amino acid sequence of at least 80% sequence identity to SEQ ID NO: 434, which has the enzymatic activity of an imine reductase, and
[0333] b) a polypeptide comprising an amino acid sequence of at least 80% sequence identity to SEQ ID NO: 602 which has the enzymatic activity of a β-hydroxy-aspartate dehydratase.

[0334] In one embodiment the kit for preparing a primary amine compound of general formula (IB) further comprises the cofactor NADH. In another embodiment, the kit comprises the cofactor NADPH. Thus, the present invention is also directed to a kit for preparing a primary amine compound of general formula (IB) from amino alcohol compound of general formula (V) comprising:
[0335] a) a polypeptide comprising an amino acid sequence of at least 80% sequence identity to an amino acid sequence selected from SEQ ID NO: 300-598, which has the enzymatic activity of an imine reductase,
[0336] b) a polypeptide comprising an amino acid sequence of SEQ ID NO: 602 which has the enzymatic activity of a β-hydroxyaspartate dehydratase, and
[0337] c) a cofactor selected from NADH or NADPH.

[0338] In one embodiment the kit for preparing a primary amine compound of general formula (IB) comprises
[0339] a) a polypeptide comprising an amino acid sequence of at least 80% sequence identity to an amino acid sequence selected from SEQ ID NO: 300-598, which has the enzymatic activity of an imine reductase,
[0340] b) a polypeptide comprising an amino acid sequence of at least 80% sequence identity to SEQ ID NO: 602 which has the enzymatic activity of a β-hydroxy-aspartate dehydratase, and
[0341] c) a cofactor selected from NADH or NADPH.

[0342] Preferably, the kit comprises
[0343] a) a polypeptide comprising an amino acid sequence of at least 80% sequence identity to an amino acid sequence selected from SEQ ID NO: 300-598, which has the enzymatic activity of an imine reductase,
[0344] b) a polypeptide comprising an amino acid sequence of SEQ ID NO: 6 which has the enzymatic activity of a β-hydroxyaspartate dehydratase, and
[0345] c) the cofactor NADH.

[0346] Preferably, the kit comprises
[0347] a) a polypeptide comprising an amino acid sequence of at least 80% sequence identity to an amino acid sequence selected from SEQ ID NO: 300-598, which has the enzymatic activity of an imine reductase,
[0348] b) a polypeptide comprising an amino acid sequence of at least 80% sequence identity to SEQ ID NO: 602 which has the enzymatic activity of a β-hydroxy-aspartate dehydratase, and
[0349] c) the cofactor NADH.

[0350] In another embodiment, the kit comprises a cofactor regeneration system capable of converting NADP⁺ to NADPH or, preferably NAD⁺ to NADH.

[0351] Thus, the herein disclosed kit for preparing a primary amine compound of general formula (IB) from amino alcohol compound of general formula (V) comprises:
[0352] a) a polypeptide comprising an amino acid sequence of at least 80% sequence identity to an amino acid sequence selected from SEQ ID NO: 300-598, which has the enzymatic activity of an imine reductase,
[0353] b) a polypeptide comprising an amino acid sequence of SEQ ID NO: 602 which has the enzymatic activity of a β-hydroxyaspartate dehydratase, and
[0354] c) a cofactor generation system for the conversion of NAD⁺ to NADH and/or NADP⁺ to NADPH.

[0355] Alternatively, the kit for preparing an amine compound of general formula (I) comprises
[0356] a) a polypeptide comprising an amino acid sequence of at least 80% sequence identity to an amino acid sequence selected from SEQ ID NO: 300-598, which has the enzymatic activity of an imine reductase,
[0357] b) a polypeptide comprising an amino acid sequence of at least 80% sequence identity to SEQ ID NO: 602 which has the enzymatic activity of a β-hydroxy-aspartate dehydratase, and
[0358] c) a cofactor generation system for the conversion of NAD⁺ to NADH and/or NADP⁺ to NADPH.

[0359] Preferably, the kit comprises
[0360] a) a polypeptide comprising an amino acid sequence of at least 80% sequence identity to an amino acid sequence selected from SEQ ID NO: 300-598, which has the enzymatic activity of an imine reductase,
[0361] b) a polypeptide comprising an amino acid sequence of SEQ ID NO: 602 which has the enzymatic activity of a β-hydroxyaspartate dehydratase, and
[0362] c) a cofactor generation system for the conversion of NAD⁺ to NADH, wherein the cofactor regeneration systems comprises formate and formate dehydrogenase.

[0363] Preferably, the kit comprises
[0364] a) a polypeptide comprising an amino acid sequence of at least 80% sequence identity to an amino acid sequence selected from SEQ ID NO: 300-598, which has the enzymatic activity of an imine reductase,
[0365] b) a polypeptide comprising an amino acid sequence of at least 80% sequence identity to SEQ ID NO: 602 which has the enzymatic activity of a β-hydroxy-aspartate dehydratase, and
[0366] c) a cofactor generation system for the conversion of NAD⁺ to NADH, wherein the cofactor regeneration systems comprises formate and formate dehydrogenase.

### Nucleic Acids Encoding Polypeptides Having the Enzymatic Activity of an Imine Reductase, Expression Vectors and Host Cells

[0367] The polypeptides having the enzymatic activity of an imine reductase disclosed herein can be encoded by nucleic acids, which may be operatively linked to one or more heterologous regulatory sequences that control gene expression to create a recombinant polynucleotide capable of expressing the polypeptide. Expression constructs containing heterologous nucleic acids encoding the polypeptides having the enzymatic activity of an imine reductase can be introduced into appropriate host cells to express the corresponding imine reductase polypeptide that is used in the inventive method.

[0368] As will be apparent to the skilled artisan, availability of a protein sequence and the knowledge of the codons corresponding to the various amino acids provide a description of all the nucleic acids capable of encoding the subject polypeptides. The degeneracy of the genetic code, where the same amino acids are encoded by alternative or synonymous codons, allows an extremely large number of nucleic acids to be made, all of which encode the imine reductase polypeptides. Thus, having knowledge of a particular amino acid sequence, those skilled in the art could make any number of different nucleic acids by simply modifying the sequence of one or more codons in a way which does not change the amino acid sequence of the protein. In this regard, the present disclosure specifically contemplates each and every possible variation of nucleic acids that could be made encoding the polypeptides described herein by selecting combinations based on the possible codon choices, and all such variations are to be considered specifically disclosed for any polypeptide having the enzymatic activity of an imine reductase described herein.

[0369] The codons are preferably selected to fit the host cell in which the protein is being produced. For example, preferred codons used in bacteria are used to express the gene in bacteria; preferred codons used in yeast are used for expression in yeast; and preferred codons used in mammals are used for expression in mammalian cells. In some embodiments, all codons need not be replaced to optimize the codon usage of the imine reductases since the natural sequence will comprise preferred codons and because use of preferred codons may not be required for all amino acid residues. Consequently, codon optimized nucleic acids encoding the polypeptides having the enzymatic activity of an imine reductase may contain preferred codons at about 40%, 50%, 60%, 70%, 80%, or greater than 90% of codon positions of the full length coding region.

[0370] Preferably, the nucleic acid comprises a nucleotide sequence encoding a polypeptide having the enzymatic activity of an imine reductase comprising the conserved amino as set forth in SEQ ID NO: 610. Preferably, the polypeptide comprises a conserved amino acid sequence selected from the sequences as set forth in SEQ ID NO: 611 to 621. More preferably, the polypeptide comprises a conserved amino acid sequence as set forth in SEQ ID NO 611. More preferably, the polypeptide comprises a conserved amino acid sequence as set forth in SEQ ID NO 617. More preferably, the polypeptide comprises a conserved amino acid sequence as set forth in SEQ ID NO 618. More preferably, the polypeptide comprises a conserved amino acid sequence as set forth in SEQ ID NO 619. More preferably, the polypeptide comprises a conserved amino acid sequence as set forth in SEQ ID NO 620. More preferably, the polypeptide comprises a conserved amino acid sequence as set forth in SEQ ID NO 621.

[0371] Preferably, the nucleic acid comprises a nucleotide sequence encoding the naturally occurring imine reductase polypeptide of SEQ ID NO: 300-598. The nucleic acid encoding a polypeptide having the enzymatic activity of an imine reductase, that is used in the inventive method, comprises a polynucleotide sequence having at least 80%, more preferably 85%, even more preferably 86%, even more preferably 87%, even more preferably 88%, even more preferably 89%, even more preferably 90%, even more preferably 91, even more preferably 92%, even more preferably, even more preferably 93%, even more preferably 94, even more preferably 95%, even more preferably 96%, even more preferably 97%, even more preferably 98% and most preferably 99% sequence identity to the nucleic acid sequence of SEQ ID NO: 300-598.

[0372] Preferably, the nucleic acid comprises a nucleotide sequence encoding the naturally occurring imine reductase polypeptide of SEQ ID NO: 300, 306, 321, 324, 325, 338, 346, 357, 374, 422, 434 and 459. The nucleic acid encoding a polypeptide having the enzymatic activity of an imine reductase, that is used in the inventive method, comprises a polynucleotide sequence having at least 80%, more preferably 85%, even more preferably 86%, even more preferably 87%, even more preferably 88%, even more preferably 89%, even more preferably 90%, even more preferably 91, even more preferably 92%, even more preferably, even more preferably 93%, even more preferably 94, even more preferably 95%, even more preferably 96%, even more preferably 97%, even more preferably 98% and most preferably 99% sequence identity to the nucleic acid sequence of SEQ ID NO: 300, 306, 321, 324, 325, 338, 346, 357, 374, 422, 434 and 459.

[0373] Preferably, the nucleic acid comprises a nucleotide sequence encoding the naturally occurring imine reductase polypeptide of SEQ ID NO: 434. In some embodiments, the nucleic acid encoding a polypeptide having the enzymatic activity of an imine reductase, that is used in the inventive method, comprises a polynucleotide sequence having at least 80%, more preferably 85%, even more preferably 86%, even more preferably 87%, even more preferably 88%, even more preferably 89%, even more preferably 90%, even more preferably 91, even more preferably 92%, even more preferably, even more preferably 93%, even more preferably 94, even more preferably 95%, even more preferably 96%, even more preferably 97%, even more preferably 98% and most preferably 99% sequence identity to the nucleic acid sequence of SEQ ID NO: 434.

[0374] Alternatively, the nucleic acid consists of a nucleotide sequence encoding the naturally occurring imine reductase polypeptide of SEQ ID NO: 300-598.

[0375] The nucleic acid as described herein is capable of hybridizing under highly stringent conditions to a polynucleotide sequence selected from SEQ ID NO: 1-299, or a complement thereof, and encodes a polypeptide having the enzymatic activity of an imine reductase.

[0376] The nucleic acid described herein further encodes a polypeptide having an imine reductase activity capable of converting a carbonyl compound of formula (III) and amine substrate compound of formula (IV), to an amine product compound of formula (I) and/or an imine compound of formula (II) or (IIA) to amine compound of formula (IA) or (IB), wherein the polypeptide comprises an amino acid sequence having at least 80%, more preferably 85%, more preferably 86%, more preferably 87%, more preferably 88%, more preferably 89%, more preferably 90%, more preferably 91%, more preferably 92%, more preferably 93%, more preferably 94%, more preferably 95%, more preferably 96%, more preferably 97%, more preferably 98%, more preferably 99% or more sequence identity to the amino acid sequence of SEQ ID NO: 300-598.

[0377] An isolated nucleic acid encoding a polypeptide may be manipulated in a variety of ways to provide for expression of the polypeptide having the enzymatic activity of an imine reductase. The nucleic acid encoding the polypeptides may be provided as expression vector where one or more control sequences are present to regulate the expression of the nucleic acids and/or polypeptides. Manipulation of the isolated polynucleotide prior to its insertion into a vector may be desirable or necessary depending on the expression vector. The techniques for modifying nucleic acids and polynucleotide sequences utilizing recombinant DNA methods are well known in the art.

[0378] The control sequences may include among others, promoters, leader sequence, polyadenylation sequence, propeptide sequence, signal peptide sequence, and transcription terminator. Suitable promoters can be selected based on the host cells used. For bacterial host cells, suitable promoters for directing transcription of the nucleic acid constructs of the present disclosure, include the promoters obtained from the E. coli lac operon, Streptomyces coelicolor agarase gene (dagA), Bacillus subtilis levansucrase gene (sacB), Bacillus licheniformis α-amylase gene (amyL), Bacillus stearothermophilus maltogenic amylase gene (amyM), Bacillus amyloliquefaciens α-amylase gene (amyQ), Bacillus licheniformis penicillinase gene (penP), Bacillus subtilis xylA and xylB genes and prokaryotic β-lactamase gene (Villa-Kamaroff et al., Proc. Natl Acad. Sci. 1978, 75, 3727), as well as the tac promoter (DeBoer et al., Proc. Natl Acad. Sci. 1983, 80, 21). Exemplary promoters for filamentous fungal host cells, include promoters obtained from the genes for Aspergillus oryzae TAKA amylase, Rhizomucor miehei aspartic proteinase, Aspergillus niger neutral α-amylase, Aspergillus niger acid stable α-amylase, Aspergillus niger or Aspergillus awamori glucoamylase (glaA), Rhizomucor miehei lipase, Aspergillus oryzae alkaline protease, Aspergillus oryzae triose phosphate isomerase, Aspergillus nidulans acetamidase and Fusarium oxysporum trypsin-like protease (WO1996/00787), as well as the NA2-tpi promoter (a hybrid of the promoters from the genes for Aspergillus niger neutral α-amylase and Aspergillus oryzae triose phosphate isomerase) and mutant, truncated and hybrid promoters thereof. Exemplary yeast cell promoters can be from the genes for Saccharomyces cerevisiae enolase (ENO-1), Saccharomyces cerevisiae galactokinase (GAL1), Saccharomyces cerevisiae alcohol dehydrogenase/glyceraldehyde-3-phosphate dehydrogenase (ADH2/GAP), and Saccharomyces cerevisiae 3-phosphoglycerate kinase. Other useful promoters for yeast host cells are described by Romanos et al., Yeast 1992, 8, 423.

[0379] The control sequence may also be a suitable transcription terminator sequence, a sequence recognized by a host cell to terminate transcription. The terminator sequence is operably linked to the 3′ terminus of the nucleic acid sequence encoding the polypeptide. Any terminator which is functional in the host cell of choice may be used in the present invention. For example, exemplary transcription terminators for filamentous fungal host cells can be obtained from the genes for Aspergillus oryzae TAKA amylase, Aspergillus niger glucoamylase, Aspergillus nidulans anthranilate synthase, Aspergillus niger α-glucosidase and Fusarium oxysporum trypsin-like protease. Exemplary terminators for yeast host cells can be obtained from the genes for Saccharomyces cerevisiae enolase, Saccharomyces cerevisiae cytochrome C (CYCI) and Saccharomyces cerevisiae glyceraldehyde-3-phosphate dehydrogenase. Other useful terminators for yeast host cells are described by Romanos et al., Yeast 1992, 8, 423.

[0380] The control sequence may also be a suitable leader sequence, a nontranslated region of an mRNA that is important for translation by the host cell. The leader sequence is operably linked to the 5′ terminus of the nucleic acid sequence encoding the polypeptide. Any leader sequence that is functional in the host cell of choice may be used. Exemplary leaders for filamentous fungal host cells are obtained from the genes for Aspergillus oryzae TAKA amylase and Aspergillus nidulans triose phosphate isomerase. Suitable leaders for yeast host cells are obtained from the genes for Saccharomyces cerevisiae enolase (ENO-1), Saccharomyces cerevisiae 3-phosphoglycerate kinase, Saccharomyces cerevisiae α-factor and Saccharomyces cerevisiae alcohol dehydrogenase/glyceraldehyde-3-phosphate dehydrogenase (ADH2/GAP).

[0381] The control sequence may also be a polyadenylation sequence, a sequence operably linked to the 3′ terminus of the nucleic acid sequence and which, when transcribed, is recognized by the host cell as a signal to add polyadenosine residues to transcribed mRNA. Any polyadenylation sequence which is functional in the host cell of choice may be used in the present invention. Exemplary polyadenylation sequences for filamentous fungal host cells can be from the genes for Aspergillus oryzae TAKA amylase, Aspergillus niger glucoamylase, Aspergillus nidulans anthranilate synthase, Fusarium oxysporum trypsin-like protease and Aspergillus niger α-glucosidase. Useful polyadenylation sequences for yeast host cells are described by Guo and Sherman, Mol Cell Bio 1995, 15, 5983.

[0382] The control sequence may also be a signal peptide coding region that codes for an amino acid sequence linked to the amino terminus of a polypeptide and directs the encoded polypeptide into the cell's secretory pathway. The 5′ end of the coding sequence of the nucleic acid sequence may inherently contain a signal peptide coding region naturally linked in translation reading frame with the segment of the coding region that encodes the secreted polypeptide. Alternatively, the 5′ end of the coding sequence may contain a signal peptide coding region that is foreign to the coding sequence. Any signal peptide coding region which directs the expressed polypeptide into the secretory pathway of a host cell of choice may be used in the present invention. Effective signal peptide coding regions for bacterial host cells are the signal peptide coding regions obtained from the genes for Bacillus NCIB 11837 maltogenic amylase, Bacillus stearothermophilus α-amylase, Bacillus licheniformis subtilisin, Bacillus licheniformis β-lactamase, Bacillus stearothermophilus neutral proteases (nprT, nprS, nprM), and Bacillus subtilis prsA. Further signal peptides are described by Simonen and Palva, Microbiol Rev 1993, 57, 109. Effective signal peptide coding regions for filamentous fungal host cells can be the signal peptide coding regions obtained from the genes for Aspergillus oryzae TAKA amylase, Aspergillus niger neutral amylase, Aspergillus niger glucoamylase, Rhizomucor miehei aspartic proteinase, Humicola insolens cellulase and Humicola lanuginosa lipase. Useful signal peptides for yeast host cells can be from the genes for Saccharomyces cerevisiae α-factor and Saccharomyces cerevisiae invertase. Other useful signal peptide coding regions are described by Romanos et al., Yeast 1992, 8, 423.

[0383] The control sequence may also be a propeptide coding region that codes for an amino acid sequence positioned at the amino terminus of a polypeptide. The resultant polypeptide is known as a proenzyme or propolypeptide (or a zymogen in some cases). A propolypeptide can be converted to a mature active polypeptide by catalytic or autocatalytic cleavage of the propeptide from the propolypeptide. The propeptide coding region may be obtained from the genes for Bacillus subtilis alkaline protease (aprE), Bacillus subtilis neutral protease (nprT), Saccharomyces cerevisiae α-factor, Rhizomucor miehei aspartic proteinase and Myceliophthora thermophila lactase (WO1995/33836). Where both signal peptide and propeptide regions are present at the amino terminus of a polypeptide, the propeptide region is positioned next to the amino terminus of a polypeptide and the signal peptide region is positioned next to the amino terminus of the propeptide region.

[0384] It may also be desirable to add regulatory sequences, which allow the regulation of the expression of the polypeptide relative to the growth of the host cell. Examples of regulatory systems are those which cause the expression of the gene to be turned on or off in response to a chemical or physical stimulus, including the presence of a regulatory compound. In prokaryotic host cells, suitable regulatory sequences include the lac, tac, and trp operator systems. In yeast host cells, suitable regulatory systems include, as examples, the ADH2 system or GAL1 system. In filamentous fungi, suitable regulatory sequences include the TAKA α-amylase promoter, Aspergillus niger glucoamylase promoter and Aspergillus oryzae glucoamylase promoter.

[0385] Other examples of regulatory sequences are those which allow for gene amplification. In eukaryotic systems, these include the dihydrofolate reductase gene, which is amplified in the presence of methotrexate, and the metallothionein genes, which are amplified with heavy metals. In these cases, the nucleic acid sequence encoding the polypeptide of the present invention would be operably linked with the regulatory sequence.

[0386] Thus, herein disclosed is also a recombinant expression vector comprising a nucleic acid encoding a polypeptide having the enzymatic activity of an imine reductase, and one or more expression regulating regions such as a promoter and a terminator, a replication origin, etc., depending on the type of hosts into which they are to be introduced. The various nucleic acid and control sequences described above may be joined together to produce a recombinant expression vector which may include one or more convenient restriction sites to allow for insertion or substitution of the nucleic acid sequence encoding the polypeptide at such sites. Alternatively, the nucleic acid sequence of the present disclosure may be expressed by inserting the nucleic acid sequence or a nucleic acid construct comprising the sequence into an appropriate vector for expression. In creating the expression vector, the coding sequence is located in the vector so that the coding sequence is operably linked with the appropriate control sequences for expression.

[0387] The recombinant expression vector may be any vector (e.g. a plasmid or virus), which can be conveniently subjected to recombinant DNA procedures and can bring about the expression of the polynucleotide sequence. The choice of the vector will typically depend on the compatibility of the vector with the host cell into which the vector is to be introduced. The vectors may be linear or closed circular plasmids.

[0388] The expression vector may be an autonomously replicating vector, i.e. a vector that exists as an extrachromosomal entity, the replication of which is independent of chromosomal replication, such as a plasmid, an extrachromosomal element, a minichromosome, or an artificial chromosome. The vector may contain any means for assuring self-replication. Alternatively, the vector may be one which, when introduced into the host cell, is integrated into the genome and replicated together with the chromosome(s) into which it has been integrated. Furthermore, a single vector or plasmid or two or more vectors or plasmids which together contain the total DNA to be introduced into the genome of the host cell, or a transposon may be used.

[0389] The expression vector may comprise a nucleic acid comprising a nucleotide sequence encoding a polypeptide comprising a conserved amino acid sequence as set forth in SEQ ID NO: 610. Preferably, the nucleotide sequence encodes a polypeptide comprising a conserved amino acid sequence selected from the sequences as set forth in SEQ ID NO: 611 to 621. More preferably, the nucleotide sequence encodes a polypeptide comprising a conserved amino acid sequence as set forth in SEQ ID NO 611. More preferably, the nucleotide sequence encodes a polypeptide comprising a conserved amino acid sequence as set forth in SEQ ID NO 617. More preferably, the nucleotide sequence encodes a polypeptide comprising a conserved amino acid sequence as set forth in SEQ ID NO 618. More preferably, the nucleotide sequence encodes a polypeptide comprising a conserved amino acid sequence as set forth in SEQ ID NO 619. More preferably, the nucleotide sequence encodes a polypeptide comprising a conserved amino acid sequence as set forth in SEQ ID NO 620. More preferably, the nucleotide sequence encodes a polypeptide comprising a conserved amino acid sequence as set forth in SEQ ID NO 621.

[0390] Preferably, the expression vector may comprise a nucleic acid comprising a nucleotide sequence encoding the naturally occurring imine reductase polypeptide selected from SEQ ID NO: 300-598. In some embodiments, the expression vector comprises a nucleic acid encoding a polypeptide having the enzymatic activity of an imine reductase, that is used in the inventive method, which comprises a polynucleotide sequence having at least 80%, more preferably 85%, even more preferably 86%, even more preferably 87%, even more preferably 88%, even more preferably 89%, even more preferably 90%, even more preferably 91, even more preferably 92%, even more preferably, even more preferably 93%, even more preferably 94, even more preferably 95%, even more preferably 96%, even more preferably 97%, even more preferably 98% and most preferably 99% sequence identity to the nucleic acid sequence selected from SEQ ID NO: 1-299.

[0391] Further, the expression vector may comprise a nucleic acid encoding a polypeptide having the enzymatic activity of an imine reductase, that is used in the inventive method, which comprises a polynucleotide sequence having at least 80%, more preferably 85%, even more preferably 86%, even more preferably 87%, even more preferably 88%, even more preferably 89%, even more preferably 90%, even more preferably 91, even more preferably 92%, even more preferably, even more preferably 93%, even more preferably 94, even more preferably 95%, even more preferably 96%, even more preferably 97%, even more preferably 98% and most preferably 99% sequence identity to the nucleic acid sequence selected from SEQ ID Nos.: 1, 7, 22, 25, 26, 39, 47, 58, 75, 123, 135 and 160.

[0392] Further, the expression vector may comprise a nucleic acid encoding a polypeptide having the enzymatic activity of an imine reductase, that is used in the inventive method, which comprises a polynucleotide sequence having at least 80%, more preferably 85%, even more preferably 86%, even more preferably 87%, even more preferably 88%, even more preferably 89%, even more preferably 90%, even more preferably 91, even more preferably 92%, even more preferably, even more preferably 93%, even more preferably 94, even more preferably 95%, even more preferably 96%, even more preferably 97%, even more preferably 98% and most preferably 99% sequence identity to the nucleic acid sequence of SEQ ID NO: 135.

[0393] The expression vector may also comprise a nucleic acid consisting of a nucleotide sequence encoding the naturally occurring imine reductase polypeptide of SEQ ID Nos.: 300-598.

[0394] The expression vector may further comprise a nucleic acid encoding a polypeptide having an imine reductase activity capable of converting a carbonyl compound of formula (III) and amine substrate compound of formula (IV), to an amine product compound of formula (I) and/or an imine compound of formula (II) or (IIA) to amine compound of formula (IA) or (IB), wherein the polypeptide comprises an amino acid sequence having at least 80%, more preferably 85%, more preferably 86%, more preferably 87%, more preferably 88%, more preferably 89%, more preferably 90%, more preferably 91%, more preferably 92%, more preferably 93%, more preferably 94%, more preferably 95%, more preferably 96%, more preferably 97%, more preferably 98%, more preferably 99% or more sequence identity to the amino acid sequence of SEQ ID Nos.: 300-598.

[0395] The expression vector, as described herein, preferably contains one or more selectable markers, which permit easy selection of transformed cells. A selectable marker is a gene the product of which provides for biocide or viral resistance, resistance to heavy metals, prototrophy to auxotrophs, and the like. Examples of bacterial selectable markers are the dal genes from Bacillus subtilis or Bacillus licheniformis or markers, which confer antibiotic resistance such as ampicillin, kanamycin, chloramphenicol or tetracycline resistance. Suitable markers for yeast host cells are ADE2, HIS3, LEU2, LYS2, MET3, TRP1, and URA3. Selectable markers for use in a filamentous fungal host cell include, but are not limited to, amdS (acetamidase), argB (ornithine carbamoyltransferase), bar (phosphinothricin acetyltransferase), hph (hygromycin phosphotransferase), niaD (nitrate reductase), pyrG (orotidine-5′-phosphate decarboxylase), sC (sulfate adenyltransferase) and trpC (anthranilate synthase), as well as equivalents thereof. Embodiments for use in an Aspergillus cell include the amdS and pyrG genes of Aspergillus nidulans or Aspergillus oryzae and the bar gene of Streptomyces hygroscopicus.

[0396] Thus, the expression vector, as described herein, comprises
[0397] a) a nucleic acid comprising a nucleotide sequence encoding the naturally occurring imine reductase polypeptide selected from SEQ ID NO: 300-598; and
[0398] b) a selectable marker.

[0399] Alternatively, the expression vector, as described herein, may comprise
[0400] a) a nucleic acid comprising a polynucleotide sequence having at least 80% sequence identity to the nucleic acid sequence selected from SEQ ID NO: 300-598; and
[0401] b) a selectable marker.

[0402] Further, the expression vector, as described herein, may comprise
[0403] a) a nucleic acid comprising a polynucleotide sequence having at least 80% sequence identity to the nucleic acid sequence selected from SEQ ID NO: 1, 7, 22, 25, 26, 39, 47, 58, 75, 123, 135 and 160; and
[0404] b) a selectable marker.

[0405] Also, the expression vector, as described herein, may comprise
[0406] a) a nucleic acid comprising a polynucleotide sequence having at least 80% sequence identity to the nucleic acid sequence of SEQ ID NO: 135; and
[0407] b) a selectable marker.

[0408] The expression vector may be further constructed by ligating a nucleic acid encoding a polypeptide having an imine reductase activity into the commercially available vector selected from pET-28b, pET-32b, pET-3b, pET-9b, pET-14b, pACYCDuet-1, pETDuet-1, pT7-FLAG-1 pTAC-MAT-Tag-1 and pET-16b. The pET-16b vector (SEQ ID NO: 609) includes an N-terminal His.Tag sequence, a Factor Xa site and three cloning sites.

[0409] Thus, the expression vector may comprise
[0410] a) a nucleic acid comprising a polynucleotide sequence having at least 80% sequence identity to the polynucleotide sequence selected from SEQ ID NO: 1-300; and
[0411] b) a vector selected from selected from pET-28b, pET-32b, pET-3b, pET-9b, pET-14b, pACYCDuet-1, pETDuet-1, pT7-FLAG-1 pTAC-MAT-Tag-1 and pET-16b.

[0412] Also, the expression vector, as described herein, may comprise
[0413] a) a nucleic acid comprising a polynucleotide sequence having at least 80% sequence identity to the polynucleotide sequence selected from SEQ ID NO: 1-300; and
[0414] b) a pET-16b vector having the polynucleotide sequence of SEQ ID NO: 609.

[0415] The polypeptides having an imine reductase activity and corresponding nucleic acids can be obtained using methods used by those skilled in the art. Engineered variants of the naturally occurring polypeptide having imine reductase activity described herein can be obtained by subjecting the nucleic acid encoding the naturally occurring imine reductase (SEQ ID Nos.: 300-598) to mutagenesis and/or directed evolution methods.

[0416] Where the sequence of the polypeptides having an imine reductase activity is known, the nucleic acids encoding the enzyme can be prepared by standard solid-phase methods, according to known synthetic methods, or PCR amplification. For instance, fragments of up to about 100 bases can be individually synthesized, then joined (e.g., by enzymatic or chemical litigation methods, or polymerase mediated methods) to form any desired continuous sequence. For example, nucleic acids encoding portions of the polypeptides having an imine reductase activity can be prepared by chemical synthesis using, e.g., the classical phosphoramidite method, as it is typically practiced in automated synthetic methods. According to the phosphoramidite method, oligonucleotides are synthesized, i.e. in an automatic DNA synthesizer, purified, annealed, ligated and cloned in appropriate vectors. In addition, essentially any nucleic acid can be obtained from any of a variety of commercial sources. Additional variations can be created by synthesizing oligonucleotides containing deletions, insertions, and/or substitutions, and combining the oligonucleotides in various permutations to create polypeptides having an imine reductase activity with improved properties.

[0417] The polypeptides used in the inventive method can be prepared by expressing the polypeptide in a suitable host cell, which comprises the corresponding nucleic acid encoding the polypeptide. In the host cell, the nucleic acid encoding the polypeptide used in the inventive method is operatively linked to one or more control sequences for expression of the polypeptide having imine reductase activity within the host cell.

[0418] Host cells for use in expressing the polypeptides encoded by the expression vectors described herein are well known in the art and include but are not limited to, bacterial cells, such as E. coli, Bacillus subtilis, Streptomyces and Salmonella typhimurium cells; fungal cells, such as yeast cells (e.g. Saccharomyces cerevisiae or Pichia pastoris (ATCC Accession No. 201178)); insect cells such as Drosophila S2 and Spodoptera Sf9 cells; animal cells such as CHO, COS, BHK, 293 and Bowes melanoma cells and plant cells. Exemplary host cells are Escherichia coli W3110 (ΔfhuA), BL21 and E. coli BL21 AI.

[0419] Appropriate culture mediums and growth conditions for the above-described host cells are well known in the art. Polynucleotides for expression of the imine reductase may be introduced into cells by various methods known in the art. Techniques include among others, electroporation, biolistic particle bombardment, liposome mediated transfection, calcium chloride transfection, and protoplast fusion.

[0420] Thus, the polypeptide having the enzymatic activity of an imine reductase may be prepared by a method comprising:
[0421] (a) providing a nucleic acid comprising a polynucleotide sequence having at least 80% sequence identity to a polynucleotide sequence selected from SEQ ID NO: 1-299, which encodes a polypeptide having the enzymatic activity of an imine reductase, and
[0422] (b) expressing the polypeptide encoded by the nucleic acid.

[0423] The polypeptide having the enzymatic activity of an imine reductase may also be prepared by a method comprising
[0424] (a) providing a nucleic acid comprising a polynucleotide sequence having at least 80% sequence identity to a polynucleotide sequence selected from SEQ ID NO: 1, 7, 22, 25, 26, 39, 47, 58, 75, 123, 135 and 160, which encodes a polypeptide having the enzymatic activity of an imine reductase, and
[0425] (b) expressing the polypeptide encoded by the nucleic acid.

[0426] The polypeptide having the enzymatic activity of an imine reductase may also be prepared by a method comprising
[0427] (a) providing a nucleic acid comprising a polynucleotide sequence having at least 80% sequence identity to SEQ ID NO: 135, which encodes a polypeptide having the enzymatic activity of an imine reductase, and
[0428] (b) expressing the polypeptide encoded by the nucleic acid.

[0429] The polypeptide having the enzymatic activity of an imine reductase may also be prepared by a method comprising
[0430] (a) providing a nucleic acid encoding a polypeptide comprising an amino acid sequence of at least 80% sequence identity to an amino acid sequence selected from SEQ ID NO: 300-598 and which has the enzymatic activity of an imine reductase, and
[0431] (b) expressing the polypeptide encoded by the nucleic acid.

[0432] The polypeptide having the enzymatic activity of an imine reductase may also be prepared by a method comprising
[0433] (a) providing a nucleic acid encoding a polypeptide comprising an amino acid sequence of at least 80% sequence identity to an amino acid sequence selected from SEQ ID NO: 300-598 and wherein the polypeptide is capable of converting a carbonyl compound of formula (III) and amine substrate compound of formula (IV), to an amine product compound of formula (I) and/or an imine compound of formula (II) or (IIA) to amine compound of formula (IA) or (IB), and
[0434] (b) expressing the polypeptide encoded by the nucleic acid.

[0435] Alternatively, the polypeptide having the enzymatic activity of an imine reductase may also be prepared by a method comprising
[0436] (a) providing a nucleic acid encoding a polypeptide comprising an amino acid sequence of at least 80% sequence identity to an amino acid sequence selected from SEQ ID NO: 300-598 and wherein the polypeptide is capable of converting a carbonyl compound of formula (III) and amine substrate compound of formula (IV), to an amine product compound of formula (I) and/or an imine compound of formula (II) or (IIA) to amine compound of formula (IA) or (IB), and
[0437] (b) inserting the nucleic acid of (a) into a suitable host cell and expressing said nucleic acid in order to express a polypeptide having the enzymatic activity of an imine reductase.

[0438] The polypeptide having the enzymatic activity of an imine reductase may also be prepared by a method comprising
[0439] (a) providing a nucleic acid comprising a polynucleotide sequence having at least 80% sequence identity to a polynucleotide sequence selected from SEQ ID NO: 1-299, which encodes a polypeptide having the enzymatic activity of an imine reductase, and
[0440] (b) inserting the nucleic acid of (a) into a suitable host cell and expressing said nucleic acid in order to express a polypeptide having the enzymatic activity of imine reductase.

[0441] In some embodiments, the method for preparing or manufacturing a polypeptide having the enzymatic activity of an imine reductase further comprises the step of isolating the polypeptide. The polypeptides expressed in appropriate cells can be isolated (or recovered) from the host cells, the culture medium and/or expression medium using any one or more of the well known techniques used for protein purification, including, among others, lysozyme treatment, sonication, filtration, salting-out, ultra-centrifugation, and chromatography. Suitable solutions for lysing and the high efficiency extraction of proteins from bacteria, such as E. coli, are commercially available, such as CelLytic B™ from Sigma-Aldrich. Chromatographic techniques for isolation of the imine reductase polypeptides include, among others, reverse phase chromatography high performance liquid chromatography, ion exchange chromatography, gel electrophoresis, and affinity chromatography.

[0442] Thus, the polypeptide having the enzymatic activity of an imine reductase may also be prepared by a method comprising
[0443] (a) providing a nucleic acid comprising a polynucleotide sequence having at least 80% sequence identity to a polynucleotide sequence selected from SEQ ID Nos: 1-299, which encodes a polypeptide having the enzymatic activity of an imine reductase,
[0444] (b) inserting the nucleic acid of (a) into a suitable host cell and expressing said nucleic acid in order to express a polypeptide having the enzymatic activity of an imine reductase, and
[0445] (c) isolating the expressed polypeptide.

### DESCRIPTION OF THE FIGURES

[0446] FIG. 1: illustrates the reaction sequence of the β-hydroxyaspartate pathway (BHAP) in Paracoccus denitrificans for the conversion of glyoxylate via the unstable iminosuccinate (shown in brackets) into oxaloacetate. The italic numbers represent the enzyme catalyzing the respective reaction: 1: aspartate-glyoxylate transaminase; 2: (2R,3S)-β-hydroxyaspartate aldolase (BHAA); 3: (2R,3S)-β-hydroxyaspartate dehydratase (BHAD) and 4: iminosuccinate reductase (ISRed). The net equation of the pathway is shown below the scheme.

[0447] FIG. 2: shows different reactions for the preparation of amines. FIG. 2A refers to the reductive amination of a ketone or aldehyde III and a secondary amine IV in order to obtain a tertiary amine I; FIG. 2B shows the reduction of a secondary imine compound II to a secondary amine compound IA; and FIG. 2C is directed to the inventive reduction of a primary imine compound IIA to a primary amine compound IB. The asterisks in formulae IA and IB indicate that a stereocenter is formed at the carbon atom attached to the amine nitrogen atom in case a chiral or pro-chiral imine compound was used.

[0448] FIG. 3: LC-MS analysis of monodeuterated L-aspartate formed of glycine and glyoxylate by the BHAA and BHAD enzymes in the presence of varying amounts of NaCNBH₃ in D₂O according to Example 3.

[0449] FIG. 4: LC-MS analysis of L-aspartate and (2R,3S)-β-hydroxyaspartate formed of glycine and glyoxylate by the BHAA, BHAD and Red enzymes according to Example 3.

[0450] FIG. 5: LC-MS-based analysis of the reactions catalyzed by β-hydroxyaspartate dehydratase (BHAD) and iminosuccinate reductase (ISRed). An overview of the relevant reactions is given in (A). To demonstrate that BHAD produces iminosuccinate, (2R,3S)-β-hydroxyaspartate (light grey) is incubated in ²H₂O with BHAD and with/without NaBH₃CN to yield monodeuterated aspartate (medium grey; B) or oxaloacetate (white; C). To demonstrate that ISRed reduces iminosuccinate to aspartate, (2R,3S)-β-hydroxyaspartate is incubated with BHAD and with/without iminosuccinate reductase to yield aspartate (dark grey; D) or oxaloacetate (white; E). n=3, error bars depict standard deviation.

[0451] FIG. 6: Michaelis-Menten kinetics for the Red enzyme, with iminosuccinate synthesized in situ from BHA and varying amounts of the BHAD enzyme. The curve was fitted in GraphPad Prism 7. The vₘₐₓ is 270±10 U mg⁻¹ (n=1).

[0452] FIG. 7: shows the crystal structure of the iminosuccinate reductase (ISRed). a, Cartoon representation of the iminosuccinate reductase homodimer (PDB ID 6QKH) with superimposed protein surface (side view—left panel, top view—right panel). b, Superimposition of monomers of iminosuccinate reductase and L-alanine dehydrogenase (PDB ID 1OMO) with bound NAD⁺. RMS of 1.287 Å over 241 Cα-atoms. c, Superimposition of the active sites of iminosuccinate reductase and L-alanine dehydrogenase. Although the binding of the nicotine amide moiety appears to be similar in both cases, the residues lining the active site from above differ substantially. These residues are located in the β-strands which also form the dimerization interface (see a for comparison) and are likely to be involved in the binding and orientation of the respective substrates above the nicotine amide moiety.

[0453] The following examples are included to demonstrate preferred embodiments of the invention. It should be appreciated by those skilled in the art that the techniques disclosed in the examples, which follow represent techniques discovered by the inventor to function well in the practice of the invention, and thus can be considered to constitute preferred modes for its practice. However, those skilled in the art should, in light of the present disclosure, appreciate that many changes can be made in the specific embodiments, which are disclosed and still obtain a like or similar result without departing from the spirit and scope of the invention.

[0454] Further modifications and alternative embodiments of various aspects of the invention will be apparent to those skilled in the art in view of this description. Accordingly, this description is to be construed as illustrative only and is for the purpose of teaching those skilled in the art the general manner of carrying out the invention. It is to be understood that the forms of the invention shown and described herein are to be taken as examples of embodiments. Elements and materials may be substituted for those illustrated and described herein, parts and processes may be reversed, and certain features of the invention may be utilized independently, all as would be apparent to one skilled in the art after having the benefit of this description of the invention. Changes may be made in the elements described herein without departing from the spirit and scope of the invention as described in the following claims.

### EXAMPLES

### Abbreviations and Acronyms

[0455] IRed imine reductase
ISRed iminosuccinate reductase
BHA (2R,3S)-β-hydroxyaspartate
BHAA (2R,3S)-β-hydroxyaspartate aldolase
BHAD (2R,3S)-β-hydroxyaspartate dehydratase
DNA desoxyribo nucleic acid

### Chemicals & Reagents

[0456] Unless otherwise stated, all chemicals and reagents were acquired from Sigma-Aldrich, and were of the highest purity available.

### Example 1: Construction of Expression Vectors for Heterologous Expression of the Imine Reductase, β-Hydroxyaspartate Aldolase and β-Hydroxyaspartate Dehydratase Polypeptide

[0457] The gene encoding for the imine reductase enzyme from Paracoccus denitrificans DSM 413 (IRed; nucleic acid sequence shown in SEQ ID NO: 135; amino acid sequence shown in SEQ ID NO: 434) was cloned into the standard expression vector pET16b (commercially available from Merck Millipore). To this end, the Red gene was amplified from genomic DNA of Paracoccus denitrificans DSM 413 with the primers

(SEQ ID NO: 603)
5′-GACGCCTCATATGCTCGTCGTCGCCGAAAAG-3′
(SEQ ID NO: 604)
5′-GCCACTCCTCGAGTCAGATCTCGACCTCTTG-3′

[0458] The resulting PCR product was digested with the endonucleases NdeI and XhoI and ligated into the expression vector pET16b to create a vector for heterologous expression of Red.

[0459] The gene encoding for the β-hydroxyaspartate aldolase enzyme from Paracoccus denitrificans DSM 413 (BHAA; nucleic acid sequence shown in SEQ ID NO: 599; amino acid sequence shown in SEQ ID NO: 600) was cloned into the standard expression vector pET16b (commercially available from Merck Millipore). To this end, the BHAA gene was amplified from genomic DNA of Paracoccus denitrificans DSM 413 with the primers

(SEQ ID NO: 605)
5′-GACGCCGCATATGAACGCGAAAACGGATTTC-3′
(SEQ ID NO: 606)
5′-GACACCTGGATCCTCAGTAGCCCTTTCCG-3′

[0460] The resulting PCR product was digested with the endonucleases NdeI and BamHI and ligated into the expression vector pET16b to create a vector for heterologous expression of BHAA.

[0461] The gene encoding for the β-hydroxyaspartate dehydratase enzyme from Paracoccus denitrificans DSM 413 (BHAD; nucleic acid sequence shown in SEQ ID NO: 601; amino acid sequence shown in SEQ ID NO: 602) was cloned into the standard expression vector pET16b (commercially available from Merck Millipore). To this end, the BHAD gene was amplified from genomic DNA of Paracoccus denitrificans DSM 413 with the primers

(SEQ ID NO: 607)
5′-GACGCTGCATATGTATATCCCGACCTATGAG-3′
(SEQ ID NO: 608)
5′-GACACTCGGATCCTCAGTTCCACGGCAGCTTG-3′

[0462] The resulting PCR product was digested with the endonucleases NdeI and BamHI and ligated into the expression vector pET16b to create a vector for heterologous expression of BHAD.

### Example 2: Heterologous Expression and Purification of Recombinant Proteins

[0463] For the heterologous overexpression of the Red, BHAA and BHAD enzymes, respectively, the corresponding plasmid encoding the respective enzyme was first transformed into chemically competent E. coli BL21 AI cells. The cells transformed with the respective plasmid encoding one of said enzymes were then grown on LB agar plates containing 100 μg mL⁻¹ ampicillin at 37° C. overnight. A starter culture in selective LB medium was then inoculated from a single colony on the next day and left to grow overnight at 37° C. in a shaking incubator. The starter culture was then used on the next day to inoculate an expression culture in selective TB medium in a 1:100 dilution. The expression culture was grown at 37° C. in a shaking incubator to an OD₆₀₀ of 0.5 to 0.7, induced with 0.5 mM IPTG and 0.2% L-arabinose and grown overnight at 18° C. in a shaking incubator.

[0464] Cells were harvested at 6,000×g for 15 min and cell pellets were stored at −20° C. until purification of enzymes. Cell pellets were resuspended in two-fold volume of buffer A (300 mM NaCl, 25 mM Tris pH 8.0, 15 mM imidazole, 1 mM β-mercaptoethanol, 0.1 mM MgCl₂, 0.01 mM pyridoxalphosphate (PLP), and one tablet of SIGMAFAST™ protease inhibitor cocktail, EDTA-free (Sigma-Aldrich) per L). The cell suspension was treated with a sonicator in order to lyse the cells and centrifuged at 50,000×g and 4° C. for 1 h. The supernatant was loaded onto 1 ml Protino® Ni-NTA Agarose (Macherey-Nagel) in a gravity column, which had previously been equilibrated with 5 column volumes of buffer A. The column was washed with 20 column volumes of buffer A and 5 column volumes of 85% buffer A and 15% buffer B and the respective protein was eluted with buffer B (buffer A, but with 500 mM imidazole). The eluate was desalted using PD-10 desalting columns (GE Healthcare) and buffer C (100 mM NaCl, 25 mM Tris pH 8.0, 1 mM MgCl₂, 0.01 mM PLP, 0.1 mM DTT). The respective purified enzymes were stored at −20° C. in buffer C containing 50% glycerol.

### Example 3: Enzyme Assays

[0465] The enzyme assay to generate iminosuccinate from glyoxylate and glycine (catalyzed by the BHAA and BHAD enzymes) and further chemical reduction of iminosuccinate to aspartate with the reducing agent NaCNBH₃ was performed at 30° C. in a total volume of 600 μl. The reaction mixture contained 50 mM Tris pH 7.5, 1 mM glycine, 1 mM glyoxylate, 0.1 mM PLP, 1 mM MgCl₂, 60 μg BHAA enzyme, 5.4 μg BHAD enzyme and varying amounts of NaCNBH₃ (0, 1 or 5 mM, respectively). The reaction was carried out in deuterated water (D₂O). 180 μL aliquots were taken at time points 0, 1 and 3 minute(s) and the reaction was immediately stopped by addition of formic acid (4% final concentration). The samples were centrifuged at 17,000×g and 4° C. for 15 min and the supernatant diluted 1:4 in double-distilled water for LC-MS analysis (see FIG. 3).

[0466] The enzyme assay to generate aspartate from glyoxylate and glycine (catalyzed by the BHAA, BHAD and ISRed enzymes) was performed at 30° C. in a total volume of 1 ml. The reaction mixture contained 50 mM MOPS/KOH pH 7.5, 1 mM glycine, 1 mM glyoxylate, 0.4 mM NADH, 0.1 mM PLP, 1 mM MgCl₂, 100 μg BHAA enzyme, 9 ug BHAD enzyme and 1 μg ISRed enzyme. 180 μL aliquots were taken at time points 0, 1, 3, 5 and 10 minutes and the reaction was immediately stopped by formic acid (4% final concentration). The samples were centrifuged at 17,000×g and 4° C. for 15 min and the supernatant diluted 1:4 in double-distilled water for LC-MS analysis (see FIG. 4).

[0467] Thus, when incubating glyoxylate, glycine and the required cofactors together with the BHAA, BHAD and ISRed enzymes, increasing amounts of aspartate are formed over the course of 10 min.

[0468] The LC-MS measurements were done using an Agilent 6550 iFunnel Q-TOF LC-MS system equipped with an electrospray ionization source set to negative ionization mode. Liquid chromatography (LC) was carried out as follows: The analytes were separated on an aminopropyl column (30 mm×2 mm, particle size 3 μm, 100 Å, Luna NH₂, Phenomenex) using a mobile phase system comprised of 95:5 20 mM ammonium acetate pH 9.3 (adjusted with ammonium hydroxide to a final concentration of approximately 10 mM)/acetonitrile (A) and acetonitrile (B). Chromatographic separation was carried out using the following gradient condition at a flow rate of 250 μl min⁻¹: 0 min 85% B; 3.5 min 0% B, 7 min, 0% B, 7.5 min 85% B, 8 min 85% B. Column oven and autosampler temperature were maintained at 15° C. The ESI source was set to the following parameters: Capillary voltage was set at 3.5 kV and nitrogen gas was used as nebulizing (20 psig), drying (13 l/min, 225 C) and sheath gas (12 l/min, 400° C.). The QTOF mass detector was calibrated prior to measurement using an ESI-L Low Concentration Tuning Mix (Agilent) with residuals and corrected residuals less than 2 ppm and 1 ppm respectively. MS data were acquired with a scan range of 50-600 m/z. Autorecalibration was carried out using 113 m/z as reference mass. Subsequent peak integration of all analytes was performed using the eMZed software (Kiefer et al. Bioinformatics, 2013, 29(7), 963-964) (see FIG. 5).

[0469] The enzyme assay to generate aspartate from β-hydroxyaspartate (catalyzed by the BHAD and ISRed enzymes) was performed at 30° C. in a total volume of 300 μl. The reaction mixture contained 100 mM potassium phosphate pH 7.5, 1 mM BHA, 0.2 mM NADH, 0.57, 2.85, 5.7 or 11.4 μg BHAD enzyme and 0.57 μg ISRed enzyme. The oxidation of NADH was followed at 340 nm on a Cary 60 UV-Vis photospectrometer (Agilent) in quartz cuvettes with a pathlength of 10 mm (Hellma Analytics). BHA (=(2R,3S)-β-hydroxyaspartate) was custom-synthesized by the company NewChem (Newcastle upon Tyne, United Kingdom), and was determined to be >95% pure by NMR analysis. Therefore, the ISRed enzyme catalyzes the conversion of iminosuccinate into L-aspartate.

[0470] The enzyme assay to determine the initial reaction velocity of the ISRed enzymes was performed by incubating BHA and the required cofactor NADH together with a fixed amount of the ISRed enzyme and varying amounts of the BHAD enzyme. The initial velocity depends on the amount of the BHAD enzyme present in the reaction mixture, and therefore on the amount of iminosuccinate that is produced by the BHAD enzyme and is available to the ISRed enzyme, as illustrated in FIG. 6. The initial reaction velocity of the ISRed enzyme approaches a maximum in a Michaelis-Menten kinetic fit. The preliminary vₘₐₓ of the ISRed enzyme determined by this method is 270±10 U mg⁻¹.

### Example 4: Crystallization and Structure Determination of ISRed

[0471] The sitting-drop vapor-diffusion method was used for crystallization at 16° C. Purified ISRed (5 mg ml⁻¹) was mixed in a 1:1 ratio with solution B containing 20% PEG 3350, 0.06 M BIS-TRIS propane, and 0.04 M citric acid, pH 6.4 (final drop volume 4 μL). Reservoirs were filled with 114 μL of solution B. Crystals appeared within 12 days. Crystals were briefly soaked in mother liquor supplemented with 12 mM NAD⁺ and 40% MPD (2-Methyl-2,4-pentanediol) for cryoprotection before freezing in liquid nitrogen.

[0472] X-ray diffraction data were collected at the beamlines ID29 and ID30B of the ESRF (Grenoble, France). The data was processed with the XDS (Kabsch, W. (2010). “Xds.” Acta Crystallogr D Biol Crystallogr 66(Pt 2): 125-132). (BUILT 20180126) and CCP4 7.0 software packages (Winn et al. “Overview of the CCP4 suite and current developments.” Acta Crystallogr D Biol Crystallogr 67(Pt 4): 235-242). The structures were solved by molecular replacement. A homology model was made based on the structure of L-alanine dehydrogenase (PDB ID 1OMO) (Gallagher et al. “Structure of alanine dehydrogenase from Archaeoglobus: active site analysis and relation to bacterial cyclodeaminases and mammalian mu crystallin.” J Mol Biol 342(1): 119-130.) using Swiss-Model (Waterhouse et al. “SWISS-MODEL: homology modelling of protein structures and complexes.” Nucleic Acids Res 46(W1): W296-W303.). This homology model was then used as search model for the molecular replacement. The molecular replacement was carried out using Phaser of the Phenix software package (Adams et al. PHENIX: a comprehensive Python-based system for macromolecular structure solution.” Acta Crystallogr D Biol Crystallogr 66(Pt 2): 213-221.) (version 1.14), built with Phenix.Autobuild, and refined with Phenix.Refine. Additional modeling, manual refining and ligand fitting was done in Coot (Emsley et al. “Coot: model-building tools for molecular graphics.” Acta Crystallogr D Biol Crystallogr 60(Pt 12 Pt 1): 2126-2132.) (version 0.8.9). Final positional and B-factor refinements, as well as water-picking for the BHAA structure were performed using Phenix.Refine. The structure models for BHAA and ISRed were deposited at the Protein Bata Bank in Europe (PDBe) under the PDB ID 6QKB and 6QKH, respectively. FIG. 7 was made using Pymol 1.8.

[0473] A sequence listing is attached to this application comprising the sequences of the following table:

| SEQ ID | description |
|---|---|
| 1-299 | nucleic acids encoding polypeptides having the |
| | enzymatic activity of an imine reductase |
| 300-598 | polypeptides having the enzymatic activity of |
| | an imine reductase |
| 599 | beta-hydroxyaspartate aldolase |
| 601 | beta-hydroxyaspartate dehydratase |
| 603 | PCR Primer for imine reductase polypeptide |
| | encoding gene |
| 604 | PCR Primer for imine reductase polypeptide |
| | encoding gene |
| 605 | PCR primer for beta-hydroxyaspartate |
| | aldolase polypeptide encoding gene |
| 606 | PCR primer for beta-hydroxyaspartate |
| | aldolase polypeptide encoding gene |
| 607 | PCR primer for beta-hydroxyaspartate |
| | dehydratase polypeptide encoding gene |
| 608 | PCR primer for beta-hydroxyaspartate |
| | dehydratase polypeptide encoding gene |
| 609 | pET-16b expression vector |
| 610, 611 | Conserved amino acid sequence of the iminosuccinate |
| | reductases of SEQ ID NO: 300-598 |
| 612 | Conserved amino acid sequence of the iminosuccinate |
| | reductases of SEQ ID NO: 300, 306, 321, 324, |
| | 325, 338, 346, 357, 374, 422, 434 and 459 |
| 613-616 | Conserved amino acid sequence of the iminosuccinate |
| | reductases |
| 617 | Conserved amino acid sequence of the iminosuccinate |
| | reductases of SEQ ID NO 303, 309, 310, 318, 344, 345, |
| | 347, 362, 385, 386, 396, 397, 414, 432, 434, 446, 459, |
| | 470, 472, 491, 503, 509, 513, 524, 539, 564, and 576 |
| 618 | Conserved amino acid sequence of the iminosuccinate |
| | reductases of SEQ ID NO 303, 309, 344, 345, 347, 385, |
| | 386, 396, 414, 432, 434, 446, 459, 470, 472, 503, 513, |
| | 539, 564, and 576. |
| 619 | Conserved amino acid sequence of the iminosuccinate |
| | reductases of SEQ ID NO 303, 344, 345, 347, 385, 386, |
| | 396, 414, 432, 434, 470, 472, 503, 539, and 576. |
| 620 | Conserved amino acid sequence of the iminosuccinate |
| | reductases of SEQ ID NO: 303, 344, 345, 385, 386, 396, |
| | 414, 432, 434, and 470. |
| 621 | Conserved amino acid sequence of the iminosuccinate |
| | reductases of SEQ ID NO 303, 345, 396, 432, and 434. |

What is claimed is:

1. A method of preparing a primary amine compound of general formula (IB) [chemical structure]
wherein R¹ and R² are independently selected from a hydrogen atom, and optionally substituted alkyl, alkenyl, alkynyl, alkoxy, carboxy, aminocarbonyl, thiocarbonyl, heteroalkyl, heteroalkenyl, heteroalkynyl, carboxyalkyl, aminoalkyl, haloalkyl, alkylthioalkyl, cycloalkyl, aryl, arylalkyl, heterocycloalkyl, heteroaryl, and heteroarylalkyl; and optionally R¹ and R² are linked to form a 3-membered to 10-membered ring;
comprising the step of:
A1) Providing an imine compound of general formula (IIA) [chemical structure]
wherein R¹ and R² have the meanings as defined above; and
B1) Reacting imine compound of general formula (IIA) with a polypeptide having the enzymatic activity of an imine reductase in the presence of a cofactor, to afford primary amine of general formula (IB),
wherein the polypeptide comprises a conserved amino acid as set forth in SEQ ID NO: 610.

2. The method of claim 1, wherein
R¹ represents —CH₃, —COOR⁵, —COSR⁵, —CSSR⁵, —CONHR⁵, —CONR⁵R⁶, —CH═CH—COOR⁵, —CH═CH—COSR⁵, —CH═CH—CSSR⁵, —CH═CH—CONHR⁵, —CH═CH—CONR⁵R⁶, —C≡C—COOR⁵, —C≡C—COSR⁵, —C≡C—CSSR⁵, —C≡C—CONHR⁵ or —C≡C—CONR⁵R⁶;
R² represents —H, —X¹, —CH₃, —CF₃, -Ph, —CH₂Y¹, —CH(Y¹)Y², cyclo-C₃H₅, cyclo-C₄H₇, cyclo-C₅H₉, cyclo-C₆H₁₁, cyclo-C₇H₁₃, cyclo-C₈H₁₅, —CH(OH)X¹, —C(O)Y¹, —CH(X¹)X², —CH₂CH₂X¹, —(CH₂)₃X¹, —CH₂C(O)X¹ or —C(O)CH₂X¹
X¹ and X² are independently selected from —CN, —COOR⁷, —COOR⁸, —COSR⁷, —COSR⁸, —CSSR⁷, —CSSR⁸, —CONHR⁷, —CONHR⁸, —CONR⁷R⁹ or —CONR⁸R¹⁰,
Y¹, Y² and Y³ are independently selected from —X¹, —X², —R¹³, —R¹⁴, or —R¹⁵,
R⁵-R¹⁵ represent independently of each other —H, cyclo-C₃H₅, cyclo-C₄H₇, cyclo-C₅H₉, cyclo-C₆H₁₁, cyclo-C₇H₁₃, cyclo-C₈H₁₅, -Ph, —CH₂-Ph, —CPh₃, —CH₃, —C₂H₅, —C₃H₇, —CH(CH₃)₂, —C₄H₉, —CH₂—CH(CH₃)₂, —CH(CH₃)—C₂H₅, —C(CH₃)₃, —C₅H₁₁, —CH(CH₃)—C₃H₇, —CH₂—CH(CH₃)—C₂H₅, —CH(CH₃)—CH(CH₃)₂, —C(CH₃)₂—C₂H₅, —CH₂—C(CH₃)₃, —CH(C₂H₅)₂, —C₂H₄—CH(CH₃)₂, —C₆H₁₃, —C₃H₆—CH(CH₃)₂, —C₂H₄—CH(CH₃)—C₂H₅, —CH(CH₃)—C₄H₉, —CH₂—CH(CH₃)—C₃H₇, —CH(CH₃)—CH₂—CH(CH₃)₂, —CH(CH₃)—CH(CH₃)—C₂H₅, —CH₂—CH(CH₃)—CH(CH₃)₂, —CH₂—C(CH₃)₂—C₂H₅, —C(CH₃)₂—C₃H₇, —C(CH₃)₂—CH(CH₃)₂, —C₂H₄—C(CH₃)₃, —CH(CH₃)—C(CH₃)₃, —CH═CH₂, —CH₂—CH═CH₂, —C(CH₃)═CH₂, —CH═CH—CH₃, —C₂H₄—CH═CH₂, —C₇H₁₅, —C₈H₁₇, —CH₂—CH═CH—CH₃, —CH═CH—C₂H₅, —CH₂—C(CH₃)═CH₂, —CH(CH₃)—CH═CH, —CH═C(CH₃)₂, —C(CH₃)═CH—CH₃, —CH═CH—CH═CH₂, —C₃H₆—CH═CH₂, —C₂H₄—CH═CH—CH₃, —CH₂—CH═CH—C₂H₅, —CH═CH—C₃H₇, —CH₂—CH═CH—CH═CH₂, —CH═CH—CH═CH—CH₃, —CH₂NH₂, —CH₂OH, —CH₂SH, —CH₂—CH₂NH₂, —CH₂—CH₂SH, —C₆H₄—OCH₃, —C₆H₄—OH, —CH₂—CH₂—OCH₃, —CH₂—CH₂OH, —CH₂—OCH₃, —CH₂—C₆H₄—OCH₃, —CH₂—C₆H₄—OH.

3. The method of claim 1, wherein
R¹ represents —COOH; and
R² is selected from —CH₃, —COOH, —CH₂CH₃, —(CH₂)₂CH₃, —(CH₂)₃CH₃, —CH₂COOH, —CH₂CONH₂, —CH₂CH₂OH, —CH₂CH₂SH, —CH(CH₃)COOH, —(CH₂)₂COOH or —(CH₂)₂CONH₂.

4. The method of claim 1, wherein the cofactor is NADH.

5. The method of claim 1, wherein the (R)-isomer of the primary amine of general formula (IB) is obtained.

6. The method of claim 5, wherein
R¹ represents —COOH,
R² represents —CHZ¹Z², and
wherein Z¹ represents —H or —CH₃ and
Z² represents —H, —CH₃, —CH₂CH₃, —(CH₂)₂CH₃, —COOH, —CONH₂, —CH₂OH, —CH₂SH, —CH₂COOH or —CH₂CONH₂.

7. The method of claim 1, wherein the imine compound of general formula (IIA) is provided by reacting a ketone or an aldehyde compound with ammonia or an ammonium salt.

8. The method of claim 7 comprising the steps of:
A2) Providing a carbonyl compound of general formula (III) [chemical structure]
and ammonia or an ammonium salt in order to form the primary imine of general formula (IIA);
B2) Reacting the formed primary imine of general formula (IIA) with a polypeptide having the enzymatic activity of an imine reductase and a cofactor to afford the primary amine of general formula (IB),
wherein the polypeptide comprises a conserved amino acid sequence as set forth in SEQ ID NO: 610.

9. The method of claim 6, wherein the imine compound of general formula (IIA) is provided by reacting an amino alcohol compound of general formula (V) with a β-hydroxyaspartate dehydratase [chemical structure]
wherein R¹ represents —COOH, R²* represents —C(OH)Z¹Z² and Z¹ and Z² have the meanings as defined in claim 6.

10. The method of claim 9, wherein the β-hydroxyaspartate dehydratase comprises an amino acid sequence of at least 80% sequence identity to SEQ ID NO: 602.

11. The method of claim 1, wherein the polypeptide having the enzymatic activity of an imine reductase comprises an amino acid of at least 80% sequence identity to an amino acid sequence selected from SEQ ID NO: 300-598.

12. The method of claim 1, wherein the polypeptide having the enzymatic activity of an imine reductase comprises an amino acid sequence selected from SEQ ID NO: 300-598.

13. The method of claim 1, wherein the polypeptide having the enzymatic activity of an imine reductase comprises an amino acid sequence selected from SEQ ID NO: 300, 306, 321, 324, 325, 338, 346, 357, 374, 422, 434 and 459.

14. The method of claim 1, wherein the polypeptide having the enzymatic activity of an imine reductase comprises an amino acid sequence as set forth in SEQ ID NO: 434.

15. The method of claim 1, wherein R¹ represents —COOH and R² represents —CH₂COOH.

The application's sequence listing, which the Patent Office published only in electronic form, follows.

SEQUENCE LISTING (621 sequences)

SEQ ID NO: 1 - DNA, 876 bp, Silicibacter pomeroyi DSS-3 megaplasmid
atggccgccggcaccgccaggaacttccccgtgatcagggaggccatcggccacgccgacgccctgtacggcttcaagagcggcttcgacaggcaggccctgaacctgggcctgaagagcggcggctactggcccggcaacgccgacaagggcctgaccaaccaccagagcaccgtgttcctgttcgacgccgacaccggcaggtgccaggccgtggtgggcggcaacctgctgaccgccctgaggaccgccgccgccagcagcgtgagcatcaagcacctggccaggcaggacgccaaggtgatcggcatgatcggcgccggccaccaggccaagttccagctgagggccgccctggagcagaggaacttcgagaaggtgatcggctggaacctgcaccccgagatgctggtgaacctgcaggaggtggccgacgaggccggcctgcccttcgaggccgtggagctggacggcatgagggaggccgacgtgatcatcaccatcaccagcagcttcgacgccatcctgaaggccgaccaggtgagccccggcacccacatcgcctgcatgggcaccgacaccaagggcaagcaggaggtggacccccagctgctggtgatggccgacgtgttcaccgacgaggtggcccagagcatcagcatcggcgaggcccagcacgccgtggcccacggcctgatccaggccgccgacgtggcccagatcggcgccgtgatcaacggcaccaaccccggcaggaccagcgacgcccagatcaccctgttcgacggcaccggcgtgggcctgcaggacctggccgtggccgccaccgtggtggagagggccagggccgccggcgccggcaccgagatcgccttc

SEQ ID NO: 2 - DNA, 963 bp, Silicibacter sp. TM1040
atgtacatcgtgcccgagagggtgatcgccgacctgatgaccagggaggccgccttcgacgccgtggagaaggtgttcgccgccatggccgccgaggacgcctacaacttccccgtggtgagggaggccatcggccacgaggacgccctgtacggcttcaagggcggcttcgacagggccggcctgaccctgggcctgaaggccggcggctactggccccacaacctggagaagaggggccagatcaaccaccagagcaccgtgttcctgttcgaccccgacaccggcaaggcccacgccatggtgggcggcaacctgctgaccgccctgaggaccgccgccgccagcagcgtgagcatcaagcacctggccagggacgacgccaaggtgatcggcatgatcggcgccggccaccaggccaccttccagctgagggccgccctggagcagaggaacttcgagaaggtgatcggctggaacctgcaccccgagatgctgcccaacatcgaggccgtggccgccgaggccggcctgcccttcgaggccgtggagctggacggcatgagggccgccgacgtgatcatcagcatcaccagcagcttcgaggccagcctgatggccgaccacgtgagccccggcacccacatcgcctgcatgggcaccgacaccaagggcaagcaggaggtggaccccgccctgctggtgagggccgaggtgttcaccgacgaggtggcccagagcgtgggcatcggcgaggcccagcacgccgtggcccagggcctgatcgaggccgccgacctgacccagctgggcgccgtgatcaacggcgcccaccccggcaggagcaccgacgaccagatcaccctgttcgacggcaccggcgtgggcctgcaggacctggccgtggccgccagggtggtggagctggccgtgacccagggcatcgccatggaggtggacttc

SEQ ID NO: 3 - DNA, 963 bp, Loktanella vestfoldensis SKA53
atgatcatcgtgcccgagaaggagatcgccggcctgatgaccagggccgacgcctacaacgccgtggagcaggtgttcgccagcatgagcagcggcagggcctacaacttccccgtgatcagggaggccatcggccacgccgacgccctgtacggcttcaagagcggcttcgacagggacggcctggccctgggcctgaagagcggcggctactggcccggcaacgaggccaacggcctgaccaaccaccagagcaccgtgttcctgttcgacgccgacaccggcaagtgcagggccatcgtgggcggcaacctgctgaccgccctgaggaccgccgccgccagcgccgtgagcatcaaccacctggccaggaaggacgccagcgtgctgggcatgatcggcgccggccaccagagcgtgttccagctgagggccgccgtggagcagaggagcttcgacaagatcatcggctggaactaccaccccgagatgctgcagaggctggccgccgtggccgccgagctgggcatccccttcgaggccgtgagcctggcccagctgggcgccgaggccgacgtgatcatcagcatcaccagcgccttcgcccccagcctgctggacatccacgtgaggcccggcacccacatcgcctgcatgggcaccgacaccaagggcaagcaggagctggaggccgccgtgctggccagggccaccgtgttcaccgacgaggtggcccaggccgtgaccatcggcgaggcccagcacgccatcgccgccggcctgatcacccaggacgccatccacgagatgggcgccgtggtgaacggcacccaccccggcaggaccagccccgacgagatcaccgtgttcgacggcaccggcgtgggcctgcaggacctggccgtggccagcgccgtggtggacctggccgtggccaagggcgtggccaccaccgtggagttc

SEQ ID NO: 4 - DNA, 960 bp, Paracoccus denitrificans PD1222 chromosome 2
atgctggtggtggccgagaaggagatcgccggcctgatgacccccgaggccgccttcgaggccatcgaggccgtgttcgccagcatggccaggaggaaggcctacaacttccccgtggtgagggaggccatcggccacgaggacgccctgtacggcttcaagggcggcttcgacgccagcgccctggtgctgggcctgaaggccggcggctactggcccaacaaccagaagcacaacctgatcaaccaccagagcaccgtgttcctgttcgaccccgacaccggcagggtgagcgccgccgtgggcggcaacctgctgaccgccctgaggaccgccgccgccagcgccgtgagcatcaagtacctggcccccaagggcgccaaggtgctgggcatgatcggcgccggccaccagagcgccttccagatgagggccgccgccaacgtgcacaggttcgagaaggtgatcggctggaacccccaccccgagatgctgagcaggctggccgacaccgccgccgagctgggcctgcccttcgaggccgtggagctggacaggctgggcgccgaggccgacgtgatcgtgagcatcaccagcagcttcagccccctgctgatgaacgagcacgtgaagggccccacccacatcgccgccatgggcaccgacaccaagggcaagcaggagctggaccccgccctggtggccagggccaggatcttcaccgacgaggtggcccagagcgtgagcatcggcgagtgccagcacgccatcgccgccggcctgatcagggaggaccaggtgggcgagctgggcgccgtggtggccggcgacgaccccggcaggggcgacgccgaggtgaccatcttcgacggcaccggcgtgggcctgcaggacctggccgtggcccaggccgtggtggagctggccaagcacaagggcgtggcccaggaggtggagatc

SEQ ID NO: 5 - DNA, 975 bp, Roseobacter denitrificans OCh 114
atgagcaagggcctgctgatcgtgggcgaggacatctgcgccgaggtggtgagcagcgccgacgccttcaccgccgtggaggccgtgttcggcgccatggccaagggcgacgcctacaacttccccgtgatcagggaggccatcggctacgccgacgccctgtacggcttcaagagcggcttcgacaaggccggcaagaccctgggcgtgaagagcggcggctactggcccggcaacatggacaagggcctgaccaaccaccagagcaccatcttcctgttcgaccccgacaccggcatgctggaggccctggtgggcggcaactacctgaccgccgtgaggaccgccgccagcagcagcgtgagcatcgcccacctggccaggaaggacgccaaggtgctgggcatggtgggcgccggccaccagagcaccttccagctgagggccgccgccgagcagagggacttcgagaaggtggtggcctggaacccccaccccgacatgctgcccaggctgggcgccgtggccgaggagctgggcctggccttcgaggccgtgacccaggaggagctgggcgcccaggccgacgtgatcatcaccatcaccagcgccttcgagcccctgctgatgaaggactggatcaagcccggcacccacatcgcctgcatgggcaccgacaccaagggcaagcaggaggtggaccccgagctgctggtgagcgccaccgtgttcgccgacgagatcgcccagagcgtgaccatcggcgaggcccagcacgccgtggccagcggcaggctgagcgacgccgagatcacccccatcggcgccgtgatcaacggcacccacgccggcaggagcagcgaccagcagatcaccctgttcgacggcaccggcgtgggcctgcaggacctggccgtggccagcgtggccgccagggaggccgagagcaggggcaaggccaccaggatcgccctg

SEQ ID NO: 6 - DNA, 963 bp, Ahrensia sp. R2A130 contig00014
atgatcatcgtgcccgagaaggagatcggcggcctggtgaccagggaggccgccttcgacgccgtggagagcgtgttcgccgccatggccagcggcgacgcctacaacttccccgtgatcagggaggccatcggccacgtggacgccctgtacggcttcaagggcggcttcgacaaggccggcatgagcctgggcctgaaggccggcggctactggcccaacaacctggacaccaagggcatcatcaaccaccagagcaccgtgttcctgttcgaccccgacaccggccaggtgagcgccatggtgggcggcaacctgctgaccgccctgaggaccgccgccgccagcagcgtgagcatcaagcacctggccaggaaggacgccaaggtgctgggcatgatcggcgccggccaccaggccaagttccagctgaggaccgccctggagcacagggacttcgagaaggtgatcggctggaacctgcaccccgagatgctgcccaacctggaggaggtggccgccgaggccggcctgcccttcgaggccgtggagctgagcggcatgaccgaggccgacgtgatcatcaccatcaccagcagcttcgacgccaccatgatgggcgaccacgtggcccccggcacccacgtggcctgcatgggcaccgacaccaagggcaagcaggaggtgggcgtggacctgatcgccaaggccaccctgttcgccgacgagatcgcccagagcatcagcatcggcgagtgccagcacgccatcgccgacggcagcatcaaggaggccgacatcacccccatcggcgccgtgatcaacggcacccacaccggcaggatgagcgacgacgagatcaccctgttcgacggcaccggcgtgggcctgcaggacctggccgtggccagcgccgccgtggtgctggccaaggcccagggcaaggccatcgaggtggagctg

SEQ ID NO: 7 - DNA, 990 bp, Dinoroseobacter shibae DFL-12
atgctgcagaagcccgacaccgacggcctggtgatcgtgaccgaggagatctgccagaaggtgatcgacagggacctggccttcgccgccgtgagggacgtgttcggcgccatggccaggggcgacgcctacaacttccccgtgatcagggaggccatcggccacgaggacgccctgtacggcttcaagagcggcttcgacaaggccggcatggtgctgggcgtgaaggccggcggctactggcccaacaacatggccaagggcatcatcaaccaccagagcaccgtgttcctgttcgaccccgacaccggcaagctgaaggccctggtgggcggcaactacctgaccgccatcaggaccgccgccagcagcgccgtgagcatcgaccagctggccaggaaggacgccaaggtgctgggcatggtgggcgccggccaccagagcaccttccagctgagggccgccgtggagcagagggacttcgagaaggtggtgtgctggaacccccaccccgacatgatccccaacctgggcaaggtggccgccgagatcggcatccccttcgaggccgtgagcagggaggagctgggcgcccagagcgacgtgatcatcaccatcaccagcgccttcgagcccctgatcgaggccggctacatcaagcccggcacccacctggcctgcatgggcaccgacaccaagggcaagcaggaggtggccgccgagctggtggccaaggccaccctgttcaccgacgaggtggcccagagcaccaccatcggcgagacccagcacgccatcgccagcggcgccatcacccaggacgacgtgacccccatcggcaaggtgatcaacggcgaccaccccggcaggaccagcgacgacgagatcaccctgttcgacggcaccggcgtgggcctgcaggacctggccgtggccgccgtggccgccgagcaggccgtggccaccggcgccgccaccagggtgagcctg

SEQ ID NO: 8 - DNA, 963 bp, Octadecabacter arcticus 238
atgtacatcgtgcccgagagcgccatcgccgacatcctgaccaggcccgacgccttcaacgccgtggagcaggtgttcgccgccatgagcgccggcgtggcctacaacttccccgtgatcagggaggccatcggccacgaggaggccctgtacggcttcaagggcggcttcgacggcaagggcatgagcctgggcctgaaggccggcggctactggccccacaacctggagaagaggggcatcatcaaccaccagagcaccgtgttcctgttcgaccccgacaccggcaaggtggccgccatggtgggcggcaacctgctgaccgccctgaggaccgccgccgccagcagcgtgagcatcaagcacctggccaggaaggacagcaaggtgatgggcatgatcggcgccggccaccaggccaagttccagctgaggcacgccctggagacccacagcttcgagaaggtgatcggctggaactaccaccccgagatgctgcccagcctggccgaggtggccgccgagttcgacctgcccttcgaggccgtgaccctggagggcatgaccgaggccgacgtggtgatcagcatgaccagcagcttcaaccccatcttcggcgccgcccacatcagcgacggcacccacatcgcctgcatgggcaccgacaccatcggcaagcaggagtgcgagaccgacctgatcgtgaaggccaccgtgttcaccgacgaggtggcccagagcgtgaccctgggcgagacccagcacgccgtgagcgccggcctgaagagcagggacgacatcttcgagctgggcgccgtgatcaacggcacccacgccggcaggaccagcgacagggagatcaccctgttcgacggcaccggcgtgggcctgcaggacctggccgtggccgccagcatcgtggagatcgccaaggccaagggcatcggcatggacgtggacttc

SEQ ID NO: 9 - DNA, 963 bp, pDaep_A276
atgtacatcgtgcccgagaaggccgtggccgacctggtgaccagggaggccagcttcgacgccgtggagaaggtgttcgccgccatggccagcggcgacgcctacaacttccccgtggtgagggaggccatcggccacgaggacgccctgtacggcttcaagggcggcttcgacagggccggcctgaccctgggcctgaaggccggcggctactggcccaacaacctggagaagaggggcctgatcaaccaccagagcaccgtgttcctgttcgaccccgacaccggcaaggtgaaggccatggtgggcggcaacctgctgaccgccctgaggaccgccgccgccagcagcgtgagcatcaagcacctggccaggcagggcgccaaggtgatcggcatgatcggcgccggccaccaggccaccttccagctgagggccgccctggagcagaggcccttcgagaaggtgatcggctggaactaccaccccgagatgctgcccaacatcgagaaggtggccgccgaggccggcgtgcccttcgaggccgtggacctgcccggcatggccgacgccgacgtgatcatcagcatcaccagcgccttcgcccccagcctgatggccgaccacgtgagccccggcacccacatcgcctgcatgggcaccgacaccaagggcaagcaggaggtggaggccgagctgctggtgaaggccaccgtgttcaccgacgaggtggcccagagcatcagcatcggcgaggcccagcacgccgtggcccagggcctgatccaggagagcgacgtggcccagatcggcgccgtgatcaacggcaccaaccccggcaggaccagcgacgaccagatcaccctgttcgacggcaccggcgtgggcctgcaggacctggccgtggccgccagcgtggtggaggtggccctggagaagggcatcgccatcgaggtggacttc

SEQ ID NO: 10 - DNA, 960 bp, Paracoccus sp. J56
atgtacgtggtggccgagaaggagatcgccggcctgatgaaccccgaggccgccttcgaggccatcgaggccgtgttcgccgccatggccaggaggaaggcctacaacttccccgtggtgagggaggccatcggctacgaggacgccctgtacggcttcaagggcggcttcgacgccagcggcctggccctgggcctgaaggccggcggctactggcccaacaaccagaagcacggcctgatcaaccaccagagcaccgtgttcctgttcgaccccgacaccggcagggtgagcgccgccgtgggcggcaacctgctgaccgccctgaggaccgccgccgccagcgccgtgagcatcaagtacctggcccccaagggcgccaaggtgctgggcatgatcggcgccggccaccagagcgccttccagatgagggccgccgccaacgtgcacggcttcgagaaggtgatcggctggaacccccaccccgagatgctgagcaggctggccgacaccgccgccgagctgggcctgcccttcgaggccgtggacctgccccagctgggcgaggaggccgacgtgatcatcagcatcaccagcagcttcagccccctgctgctgaacgagcacgtgaagggccccacccacatcgccgccatgggcaccgacaccaagggcaagcaggagctggaccccgccctggtgaccagggccaggatcttcaccgacgaggtggcccagagcatcagcatcggcgagtgccagcacgccatcgccgccggcctgatcaaggaggagcagatcagcgagctgggcgccgtggtgaccggcgacaaccccggcagggccgacgccgaggtgaccctgttcgacggcaccggcgtgggcctgcaggacctggccgtggcccagaaggtgctggagatcgccaaggagaagggcatcgcccagcaggtggagatc

SEQ ID NO: 11 - DNA, 993 bp, Paracoccus aminophilus JCM 7686
atggccggcttcagcaccaggaagggcctgctgatgtacatcgtggccgagaaggagatcgccggcctgatgacccccgccgccgccttcgaggccatcgaggccgtgttcgccgccatggccgccaggaaggcctacaacttccccgtggtgagggaggccatcggctacgaggacgccctgtacggcttcaagggcggcttcgacggcgccgccctgaccctgggcctgaaggccggcggctactggcccaacaaccagaagcacaacctgatcaaccaccagagcaccatcttcctgttcgacgccgacaccggcagggccaaggccgccatcggcggcaacctgctgaccgccctgaggaccgccgccgccagcgccgtgagcatcaagtacctggcccccaagggcgccaaggtgctgggcatgatcggcgccggccaccagagcgccttccagatgaaggccgccgccgccgtgcacagcttcgagaaggtgatcggctggaacccccaccccgagatgctgaccaggctggccgagaccgccgccggcctgggcctgcccttcgaggccgtggagctggacaggctgggcgccgaggccgacgtgatcatcagcatcaccagcgccttcagccccctgctgatggacgcccacgtgaagggcgagacccacatcgccgccatgggcaccgacaccaagggcaagcaggagctggaccccgccctggtggccagggccaggatcttcaccgacgaggtggcccagagcatcagcatcggcgagacccagcacgccatcgccgcccacctgatcgccgaggaggccgtgcacgagctgggcgccgtggtgaccggcgccatccccggcagggacggcgccgaggtgaccctgttcgacggcaccggcgtgggcctgcaggacctggccgtggccgccaaggtgctggagctggccatcgagaagggcctggcccagcaggccgagctg

SEQ ID NO: 12 - DNA, 963 bp, Rhizobium rhizogenes YR147
atgatcatcgtgcccgagaacgagatcgccggcctggtgacccccgccgactgcctgaaggccgtggagggcgtgttcgccagcatggccaacaagagcgcctacaacttccccgtgatcagggaggccatcggccacgccgacgccctgtacggcttcaagagcggcttcgacaggaagggcctggccctgggcctgaaggccggcggcttctggcccaacaacgtgcacaagggcctgaccaaccaccagagcaccgtgctgctgttcgacgccgacaccggcaagtgcagggccgtggtgggcggcaacctgctgaccgccctgaggaccgccgccgccagcgccatcagcatcaagtacctggccaggaaggacgccaaggtgctgggcatgatcggcgccggccaccaggccaccttccagctgagggccgccctggcccagaggcccttcgagaagatcgtgggctggaacctgcaccccgacatgctgtgcaggctggaggaggtggccaaggaggagggcctgcccttcgaggccgtggacctggacaggctgggcgccgaggccgacgtgatcatcagcatcaccagcagcttcgcccccatgctgaaggccagccaggtgagggccggcacccacctggcctgcatgggcaccgacaccaagggcaagcaggaggtggaggccgagatcctggccgccgccaccgtgttcaccgacgaggtggcccaggccatcaccatcggcgagagccagcacgccatcgagaggggcctgatcagggaggaggccatcgtggagatcggcgccgtgatcaacggcacccaccccggcaggaccagcgccgaccagatcaccctgttcgacggcaccggcgtgggcctgcaggacctggccgtggccagcgccgccgtggagctggccctggccaagggcgtggccatcgaggtggacttc

SEQ ID NO: 13 - DNA, 960 bp, Roseinatronobacter thiooxidans DSM 13087
atgtggatcgtgcccgagagcgtgatcgccgacctggtggacgagcacagcgccttcgacgccatcgaggccagcttcgccgccatggccaggggcgacgcctacaacttccccgtggtgagggaggccctgggcgccggcaggcagtacggcttcaagagcggcctggacagggtgggcgccctgctgggcgtgaaggccggcggctacttccccggcaacgccgacaggggcatccccaaccaccagagcaccgtgtacctgttcgaccaggacagcggcaagcccaccgccatcgtgggcggcaacctgctgaccgccctgaggaccgccgccgccagcgccatcagcatcgcccacctggccaggaaggacgccaaggtgctgggcatggtgggcgccggccaccagagcgccttccagatgagggccgccgtgaggcagaggcagttcgacagggtgatcggctggaacctgcaccccgacatgctgagcaggctggccgagaccgccgccgagctgggcctgcccttcgaggccgtggacctggaccagctgggcgcccaggccgacgtgatcatcaccatcaccagcagcttcgacgccatcctgcaggacgcccacatcaggcccggcacccacctggcctgcatgggcaccgacaccaagggcaagcaggagctggaccccgccatcctgaccagggccaccgtgttcaccgacgaggtggcccagagcatcagcatcggcgaggcccagcacgccgtgggcgccggcatcctgcacgccgacgccatcgtggagatcggcgccgtgatcaacggcacccaccacggcaggagggacgcccaggagatcaccgtgttcgacggcaccggcgtgggcctgcaggacctggccgtggccagcagggccgtggccctggccatcgagaggggcctggcccagaagatcgacttc

SEQ ID NO: 14 - DNA, 963 bp, Citreicella marina DSM 26424
atgctgatcgtgcccgagagggagatcgccgacctgatgaccagggacgccgccttcgccgccgtggagcaggtgttcgccgccatggccgccgacaaggcctacaacttccccgtggtgagggaggccatcggccacgaggacgccctgtacggcttcaagggcggcttcgacagggccggcctgaccctgggcctgaaggccggcggctactggcccaacaacatggacaagaggggcctgatcaaccaccagagcaccgtgttcctgttcgaccccgacaccggcaaggtgagggccatggtgggcggcaacctgctgaccgccctgaggaccgccgccgccagcagcgtgagcatcaggcacctggccaggaaggacgccaaggtgatcggcatgatcggcgccggccaccaggccaccttccagctgagggccgccctggagcagaggggcttcgagaaggtgatcggctggaactaccaccccgagatgctgcccaacatcgagaaggtggccaccgaggccggcctgcccttcgccgccgtggacctgcccggcatggccgaggccgacgtgatcatcaccatcaccagcgccttcgcccccagcctgctggccgagcacgtgagccccggcacccacatcgcctgcatgggcaccgacaccaagggcaagcaggaggtggaggccgccctgctggccagggccaccgtgttcgccgacgagatcgcccagagcgtgagcatcggcgaggcccagcacgccatcgccgagggcctgctgcaggaggccgacatcgcccagctgggcgccgtgatcaacggcacccaccccggcaggaaggacgccgccgagatcaccctgttcgacggcaccggcgtgggcctgcaggacctggccgtggccgccgccgtggtggacctggccgtggcccagggcagggccatcgaggtggacttc

SEQ ID NO: 15 - DNA, 972 bp, Ruegeria marina CGMCC 1.9108
atgagcgaggtgctgatcgtgggcgaggagatctgccagcagatcgtgggcagggccgaggccttcgccgccgtggaggccgtgttcgccgccatggacaggggcgaggccaggaacttccccgtggtgagggaggccctgggccacgccagggccctgtacggcttcaagagcggcttcgaccaggccggccacgtgctgggcgtgaagagcggcggctactggcccggcaacatggacaggggcctgaccaaccaccagagcaccgtgttcctgttcgaccccgacaccggccagctgagcgccctggtgggcggcaactacctgaccgccgtgaggaccgccgccagcagcgccgtgagcatcgcccacctggccaggagggacgccagggtgctgggcatggtgggcgccggccaccagagcaccttccagctgagggccgccgccgagcagagggccttcgagaaggtggtggcctggaacccccaccccgagatgctgcccaggctggccgtggtggccgaggagctgggcctggagttcgaggccgtgagcccccaggagctgggcgcccaggccgacgtgatcatcagcatcaccagcgccttcgagcccctgctgatgagcggctggatcaggcccggcacccacctggcctgcatgggcaccgacaccaggggcaagatggaggtggacagcgccctgctggccagggccaccgtgttcaccgacgaggtggcccagagcgtgagcatcggcgaggcccagcacgccgtgagccagggcctgatcggcgccgaggacatcacccccatcggcgccgtgatcaacggcggccaccccggcaggggcagcgaggccgacatcaccctgttcgacggcaccggcgtgggcctgcaggacctggccgtggccagcgtggccgccaagctggccgtggagaggggcctgggcgccagggccagcctg

SEQ ID NO: 16 - DNA, 963 bp, Ruegeria marina CGMCC 1.9108
atgctgatcgtgcccgagagggacatcgccgacctgatgaccagggaggccgccttcgacgccgtggagaaggtgttcgccgccatggccagcggcgacgcctacaacttccccgtggtgagggaggccatcggccacgagggcgccctgtacggcttcaagggcggcttcgacagggccgacctgaccctgggcctgaaggccggcggctactggcccaacaacctggagaagaggggcctgatcaaccaccagagcaccgtgttcctgttcgaccccgacaccggcaagcccagcgccatggtgggcggcaacctgctgaccgccctgaggaccgccgccgccagcagcgtgagcatcaagcacctggccagggccgacgccaaggtgatcggcatgatcggcgccggccaccaggccaccttccagctgagggccgccctggagcagaggaccttcgagaaggtgatcggctggaactaccaccccgagatgctgcccaacatcgagaaggtggccgccgaggccggcctgcccttcgaggccgtggacctgcccggcatggccggcgccgacgtgatcatcagcatcaccagcgccttcgcccccagcctgatggccgaccacgtgagccccggcacccacctggcctgcatgggcaccgacaccaggggcaagcaggaggtggaggccggcctgctggccagggccaccgtgttcaccgacgaggtggcccagagcatcagcatcggcgaggcccagcacgccatcagcgacggcctgatcaaggagagcgacatcgcccagctgggcgccgtgatcaacggcacccaccccggcaggaccagcgaggaccagatcaccctgttcgacggcaccggcgtgggcctgcaggacctggccgtggccgccgccgtggtggacctggccgtggacaggggcatcgccatcgaggtggacttc

SEQ ID NO: 17 - DNA, 978 bp, Thalassobacter sp. 16PALIMAR09
atgaagagccacgagatcatcatcgtgcccgaggccgagatcgccggcctgatgacccccgaggccgccttcgacgccgtggaggccatcttcggcgccatggccaggaaggacgcctacaacttccccgtgatcagggaggccatcggccacgccgacgccctgtacggcttcaagagcggcttcgacagggccggcggcgccctgggcctgaagagcggcggctactggcccggcaacgaggccaagggcctgaccaaccaccagagcaccgtgatcctgttcgacagggacaccggcaggcccaaggccatggtgggcggcaacctgctgaccgccctgaggaccgccgccgccagcgccgtgagcatcaagcacctggccagggccgacagcaaggtgctgggcatgatcggcgccggccaccagagcgccttccagatgagggccgccctgagccagaggcccttcgagaaggtgatcggctggaactaccaccccgagatgctgagcaggctggaggccgtggccaccgaggccggcctgcccttcgaggccgtggacctggacaggctgggcgccgaggccgacgtgatcatcagcatcaccagcagcttcgacgccatcctgcaggacgcccaggtgaccgccggcacccacgtggcctgcatgggcaccgacaccaagggcaagcaggaggtggaggccgccctggtggccagggccaccgtgttcaccgacgagatcgcccagagcaccaccatcggcgaggcccagcacgccatcgccagcggcctgatcaccgaggccgccatcaccgagatcggcgccgtgatcaacggcacccaccccggcaggaccagcgccgaggaggtgaccctgttcgacggcaccggcgtgggcctgcaggacctggccgtggccgaggccgtggtggacctggccctgaagaccggcgtggccaccagggtgcccttc

SEQ ID NO: 18 - DNA, 960 bp, Salinihabitans flavidus DSM 27842
atgatcatcgtgcccgagagggagatcgccggcctgatcacccccgaggccgccttcgacgccgtggagaacgtgttcggcgccatggccaggggcgaggccctgaacttccccgtgatcagggaggccatcggccacgccgacgccctgtacggcttcaagagcggcttcgacagggccggcctggtgatgggcctgaagagcggcggctactggcccggcaacgccgacaagggcctgaccaaccaccagagcaccgtgatcctgttcgaccccgacaccggcagggccaccgccctggtgggcggcaacctgctgaccgccctgaggaccgccgccgccgccgccgtgagcatcaggcacctggccaggcccgacgccaaggtgctgggcatgatcggcgccggccaccagagcaccttccagatgagggccgccctggcccagaggaggttcgagagggtgatcggctggaacctgcaccccgagaggctgagcaggctgcaggaggtggcccaggagcacgacctgcccttcgaggccgtggacctgccccagatgagggaggccgacgtgatcatcaccatcaccagcagcttcgaccccatcctgatgagcgaccacgtggccgacggcacccacatcgccagcatgggcaccgacaccaagggcaagcaggagctggagcccgccctggtggccagggccaggaggttcaccgacgaggtggcccagagcgtgagcatcggcgagtgccagcacgccgtggccgccggcctgatcggcgccgacgacatcgccgagatcggcgccgtgatcaacggcacctaccccggcagggagggcgccagggaggtgaccctgttcgacggcaccggcgtgggcctgcaggacctggccgtggccgccgccgccgtgaggctggccggcgagaagggcgtggccatcgaggtggacttc

SEQ ID NO: 19 - DNA, 960 bp, Paracoccus alcaliphilus DSM 8512
atgtggatcgtgcccgagggcgagatcgccggcctgatgacccccgaggccgccttcgacgccgtggaggccgtgttcgccgccatggccaggggcgacgccagcaacttccccgtggtgagggaggccatcggccacgaggacgccctgtacggcttcaagggcggcttcgacggcgccggcatgaccctgggcctgaaggccggcggctactggcccaacaacgccaagcacggcatcatcaaccaccagagcaccgtgttcctgttcgaccccgacaccggcagggtgagcgccgccgtgggcggcaacctgctgaccgccctgaggaccgccgccgccagcgccgtgagcagcaagtacctggcccccaagggcgccaaggtgctgggcatgatcggcgccggccaccagagcgccttccagatgaaggccgccgtgaggttcggcgacttcgacagggtgatcggctggaacccccaccccgagatgctgaccaggctggccgacaccgccgccgagctgggcctgcccttcgaggccgtggagctggacaggctgggcgccgacgccgacgtgatcatcagcatcaccagcgccttcgagcccctgctgctggacgcccacgtgaccggccccacccacatcgccgccatgggcaccgacaccaagggcaagcaggagctggaccccgtgctggtggccaggagcaggctgttcaccgacgaggtggcccagagcgtgagcatcggcgagttccagcacgccgccgcccagaagctgatcagcgagggcgacgtgatcgccctgggccaggtgatcaacggccagcacgagggcaggggcgacgccgaggtgaccatcttcgacggcaccggcgtgggcctgcaggacctggccgtggccgccgccgtggtggagctggccaagcagcagggcaaggccatcgaggtggccatc

SEQ ID NO: 20 - DNA, 981 bp, Paracoccus sp. PAMC 22219
atgcagacccagagccccctgctgatcgtgcccgagcacctgatcgccgacctgatcagcgcccaggactgcttcgccgccgtggagcaggtgttcgccgccatggccagggacaccgcctacaacttccccgtgatcagggaggccatcggccacgccgacgccctgtacggcttcaagagcggcttcgacagggagagcctggccctgggcctgaagagcggcggcttctggcccaggaacgccgacaagggcctgaccaaccaccagagcaccatcttcctgttcgacgccgacaccggcaggtgcagggccgtggtgggcggcaacctgctgaccgccctgaggaccgccgccgccagcgccgtgagcatcaggcacctggccaggcccgacgccagggtgctgggcatgatcggcgccggccaccagagcaccttccagctgagggccgccctggaccagagggacttcgacaaggtggtgggctggaacctgaaccccgccgacctggacaggctggccaaggtggccggcgagaggggcatccccttccaggccgtggacctggaccagctgggcgcccaggccgacgtgatcatcaccatcaccagcagcttcgcccccatcctgcaggccgcccaggtgaggcccggcacccacctggcctgcatgggcaccgacaccaagggcaagcaggaggtggaggccgccctgctggccaaggccagcgtgttcaccgacgaggtggcccagagcgtgaccatcggcgaggcccagcacgccgtggcccagggcctgatcgccgagggcgacatcacccagatcggcgccgccatcaacggcgacaggcccggcagggtgagcgacgaccagatcaccctgttcgacggcaccggcgtgggcctgcaggacctggccgtggccagcgccgccgtggacctggccgtggagaggggcatcgccatccaggtgcagatc

SEQ ID NO: 21 - DNA, 963 bp, Loktanella sp. 5RATIMAR09
atgatcatcgtgcccgagaaggagatcgccggcctgctgaccagggccgacgccttcgacgccgtggagaaggtgttcgccagcatgagcaagggcagcgcctacaacttccccgtgatcagggaggccatcggctacgaggacgccctgtacggcttcaagggcggcttcgacaaggccggcatggccctgggcctgaaggccggcggctactggcccaacaacctggagaagcacggccacatcaaccaccagagcaccgtgttcctgttcgaccccgacaccggcatggtgaaggccatggtgggcggcaacctgctgaccgccctgaggaccgccgccgccagcagcgtgagcatcaagcacctggccaggaaggacgccaaggtgatgggcatggtgggcgccggccaccaggccaccttccagctgagggccgccctggagcagaggaacttcgagaaggtgatcggctggaactaccaccccgagatgctgcccaacatcgagaaggtggccaacgaggccggcgtgcccttcgaggccgtgcccctggagggcctggccgaggccgacgtggtgatcagcatcaccagcaccttcgcccccaccatcatggccgaccacatcgcccccggcacccacatcgcctgcatgggcaccgacaccaagggcaagcaggaggtggaggccagcctgctggccagggccaccgtgttcaccgacgaggtggcccagagcatcagcatcggcgaggcccagcacgccgtggccagcggcctgatcgagcagagcgacgtgcacgagctgggcgccgtgatcaacggcacccaccccggcaggaccagcgccgacgagatcaccctgttcgacggcaccggcgtgggcctgcaggacctggccgtggccagcagcatcgtggacctggccgtggagaagggcatcgccatcatcgtggacttc

SEQ ID NO: 22 - DNA, 996 bp, Psychrobacter urativorans R310.10B
atgatcgaggagaacaacatcaacaacgagggcctgctgatcgtgagcgaggacgcctgcaaggccgtgatcgacagggacagcgccttcaccgccgtgaagaacgtgttcgccagcatgagcaggggcgacgcctacaacttccccgtgatcagggaggccatcggctacgccgacgccctgtacggcttcaagagcggcttcgacagggccggcaagagcctgggcctgaagagcggcggctactggcccggcaacgccgccaagggcctgaccaaccaccagagcaccatcttcctgttcaaccccgacaacggcaagctgagggccctggtgggcggcaactacctgaccgccgtgaggaccgccgccgccagcgccgtgagcatcgcccacctggccaggaaggacagcaaggtgctgggcatggtgggcgccggccaccagagcaccttccagctgagggccgccctggagcagaggaacttcgagaaggtgatcgcctggaacaaggacgccgacaggctgagcatcctgcaggagatcgccgaggagctgggcatccccttcgagagcgtggagagggagcagctgtgcgccgaggccgacgtgatcatcaccatcaccagcgccttcgagcccctgctgatgaaggagtggatcaagcccggcacccacatcgcctgcatgggcaccgacaccgtgggcaagcaggaggtggacgccgccctgatcgtgagcgccaccgtgttcaccgacgagatcgcccagagcatcagcatcggcgaggcccagcacgccatcaagagcggcgccatcaccgccgacgccatcaccaccctgggcgacgtgatcaacggcgagcaccccggcaggagcagcgacgacgagatcaccctgttcgacggcaccggcgtgggcctgcaggacctggccgtggccagcgccgccgccaggctggccgtggagaagggccaggcccagcacatcagcctg

SEQ ID NO: 23 - DNA, 963 bp, Octadecabacter temperatus SB1 null replaces 100945
atgtacatcgtgcccgaggccgccatcgccgacatcctgaccagggacgccgccttcgacgccgtggagaacgtgttcgccgccatgagcgccggcgacgcctacaacttccccgtgatcagggaggccatcggccacgaggacgccctgtacggcttcaagggcggcttcgacggcaagggcatgagcctgggcctgaaggccggcggctactggccccacaacctggccgagaggggcctgatcaaccaccagagcaccgtgttcctgttcgaccccgacaccggcaaggtggccgccatggtgggcggcaacctgctgaccgccctgaggaccgccgccgccagcagcgtgagcatcaagcacctggccaggaaggacagcaaggtgatgggcatgatcggcgccggccaccaggccaagttccagctgagggccgccctggagacccaccagttcgagaaggtgatcggctggaacaggaacgccaacgccctgagcaccctggccgacgtggccgccgagttcgacctgcccttcgaggccgtgagcctggagggcatggtggaggccgacgtggtgatcagcatcaccagcgtgttcagccccatcttcggcgccgcccacatcagcgacggcacccacgtggcctgcatgggcaccgacaccatcggcaagcaggaggccgacaccgacctggtgaccaaggccaccgtgttcaccgacgaggtggcccagagcgtgaccctgggcgaggcccagcacgccgtgggcgccggcctgaagagcagggaggacatccacgagctgggcgccgtgatcaacggcacccacaagggcaggaccagcgacaccgagatcaccctgttcgacggcaccggcgtgggcctgcaggacctggccgtgagcgccagcatcgtggagatcgccaaggccaagggcatcggcctggaggtggacttc

SEQ ID NO: 24 - DNA, 963 bp, Leisingera sp. ANG-S
atgtacatcgtgcccgagaaggccatcgccgacctggtgaccagggaggccagcttcgacgccgtggagaaggtgttcgccgccatggccgccggcgacgcctacaacttccccgtggtgagggaggccatcggccacgaggacgccctgtacggcttcaagggcggcttcgacagggccggcctgaccctgggcctgaaggccggcggctactggcccaacaacctggagaagaggggcctgatcaaccaccagagcaccgtgttcctgttcgaccccgacaccggcaaggtgaaggccatggtgggcggcaacctgctgaccgccctgaggaccgccgccgccagcagcgtgagcatcaagcacctggccaggcaggacgccaaggtgatcggcatgatcggcgccggccaccaggccaccttccagctgagggccgccctggagcagaggcagttcgagaaggtgatcggctggaactaccaccccgagatgctgcccaacatcgagaaggtggccgccgaggccggcctgcccttcgaggccgtggacctgcccggcatggccgaggccgacgtgatcatcagcatcaccagcgccttcgcccccagcctgatggccgaccacgtgagccccggcacccacgtggcctgcatgggcaccgacaccaagggcaagcaggaggtggaggccgagctgctggtgaaggccagcgtgttcaccgacgaggtggcccagagcatcagcatcggcgaggcccagcacgccgtggcccagggcctgatccaggagagcgacgtggcccagatcggcgccgtgatcaacggcaccaaccccggcaggaccagcgacgaccagatcaccctgttcgacggcaccggcgtgggcctgcaggacctggccgtggccgccagcgtggtggaggtggccgtggagaagggcatcgccatcgaggtggacttc

SEQ ID NO: 25 - DNA, 1002 bp, Neptunomonas antarctica DSM 22306
atgctggcccccgtggacccccccaccaacaagaagggcatcagcatcgtgagcgaggacgtgtgccagcagaccgtgggcaggcccgaggccttcaccgccgtggagaacgtgttcgccgccatggccaggggcgacgcctacaacttccccgtggtgagggaggccatcggccacgccgacgccctgtacggcttcaagagcggcttcgacagggccggcatgagcctgggcgtgaagagcggcggctactggcccggcaacgccgccaagggcctgaccaaccaccagagcaccatcatcctgttcgaccccgacaccggccagatcaagagcatcgtgggcggcaactacctgaccgccgtgaggaccgccgccagcagcgccgtgagcatcgcccacctggccaggaaggacgccaaggtgctgggcatgatcggcgccggccaccagagcaccttccagctgagggccgccgtggagcagagggacttcgagaaggtgctggcctggaacccccaccccaagaacctggtgaggctggccaccgtgtgcgccgagctgggcctgcccttcgaggccgtggagagggagcagctgtgcgccgaggccgacgtgatcatcaccatcaccagcgccttcgagcccctgctgaggcacgagtggatcaagcccggcacccacatcgcctgcatgggcaccgacaccaagggcaagcaggaggtggaccccgccctgctggtggccgccaccctgttcaccgacgagatcgcccagagcatcagcatcggcgaggcccagcacgccgtggccagcggcgccctgaaggccggcgacatcaccagcctgggcgacgtgatcaacggcgaccactgcggcaggagcagcgccgaggagatcaccctgttcgacggcaccggcgtgggcctgcaggacctggccgtggccagcgtggccgtgcagctggccgacgagaggaagctgagcagcaagatcagcctg

SEQ ID NO: 26 - DNA, 963 bp, Sinorhizobium fredii CCBAU 83753
atgatcatcgtgcccgagaaccagatcgccggcctgatgacccccgccgactgcctggtggccgtggaggaggtgttcgccagcatggccaagaggagcgcctacaacttccccgtgatcagggaggccatcggctacgccgacgccctgtacggcttcaagagcggcttcgacaggagcaacctggccctgggcctgaagagcggcggcttctggcccaacaacgtgcagatcggcctggccaaccaccagagcagcgtgttcctgttcgacgccgacaccggcaagtgcagggccgtggtgggcggcaacctgctgaccgccctgaggaccgccgccgccagcgccatcagcatcaagcacctggccaggaaggacgccaaggtgctgggcatgatcggcgccggccaccagagcgccttccagctgagggccgccgtggagcagaggagcttcgagaagatcctggcctggaacctgcaccccgagatgctgagcaggctggccgaggtggccatggagctgaagctgcccttcaagatcgtggacctggagaggctgggcgccgagagcgacgtgatcatcagcatcaccagcagcttcgcccccatcttcaaggccagccaggtgaggcccggcacccacctggcctgcatgggcaccgacaccaagggcaagcaggagatggaggccgagctggtggccgccgccaccgtgttcaccgacgaggtggcccaggccgtgaccatcggcgagtgccagcacgccatcgagaagaagctgctgagcagggacgacatcaccgagctgggcgccgtgatcaccggcaggcaccccggcaggagcagccccgacgagatcaccctgttcgacggcaccggcgtggccctgcaggacctggccgtggccagcgccgccgtggcccacgccgtgagcaggggcaccgccatcgaggtggacttc

SEQ ID NO: 27 - DNA, 963 bp, Defluviimonas indica DSM 24802
atgctgatcgtgcccgagagggagatcgccgacctgatgaccagggaggccgccttcgacgccgtggagaaggtgttcgccgccatggccagcggcgacgcctacaacttccccgtgatcagggaggccatcggccacgaggacgccctgtacggcttcaagggcggcttcgacagggccggcctgaccctgggcctgaaggccggcggctactggcccaacaacctggagaggcacggcctgatcaaccaccagagcaccgtgttcctgttcgacgccgacaccggcatggtgaaggccatggtgggcggcaacctgctgaccgccctgaggaccgccgccgccagcagcgtgagcatcaagcacctggccaggagggacgccaaggtgctgggcatggtgggcgccggccaccaggccaccttccagctgagggccgccctggagcagagggccttcgagaaggtgatcggctggaactaccaccccgagatgctgcccaggatcgagaaggtggccgccgaggccggcgtgcccttcgaggccgtggagctggacggcatgagggaggccgacgtgatcatcagcatcaccagcgcctacgccgccagcctgatggccaagcacgtgagccccggctgccacgtggcctgcatgggcaccgacaccaagggcaagcaggaggtggaggccgccctgctggccagggccaccgtgttcaccgacgagatcgcccagagcgtgaccatcggcgaggcccagcacgccatcgccgagggcctgatcggcgagagcgacatcgcccagctgggcgccgtgatcaacggcaccctgcccggcaggaccagccaggagcagatcaccctgttcgacggcaccggcgtgggcctgcaggacctggccgtggccgccagcgtggtggccctggccgtggagaagggcgccgccatcgaggtggacttc

SEQ ID NO: 28 - DNA, 984 bp, Marinomonas sp. S3726
atgagcaccgagaacaagggcgtgagcatcgtgagcgagaagacctgccaggccgtggtgggcaggcccgaggccttcaccgccgtggagaacgtgttcgccgccatggccaagaacagcgcctacaacttccccgtggtgagggaggccatcggccacgccgacgccctgtacggcttcaagagcggcttcgacagggacggcatggtgctgggcgtgaaggccggcggctactggcccggcaacgcccagcagggcatcaccaaccaccagagcaccgtgatcctgttcgaccccgacaccggcaagatcaagagcctggtgggcggcaactacctgaccgccgtgaggaccgccgccagcagcgccgtgagcatcgcccacctggccaggaaggacagcaaggtgctgggcatggtgggcgccggccaccagagcaccttccagctgagggccgccgtggagcagagggacttcgagaaggtggtggcctggaacttccaccccgacatgctgcccaacctggagaaggtgtgcgtggagctgggcctgcccttcgaggccgtgagcagggaggagctgggcgcccaggccgacgtgatcatcaccatcaccagcgccttcgagagcctgatgcagaaggactggatcaagcccggcacccacatcgcctgcatgggcaccgacaccaagggcaagcaggaggtggacgccgacctgctggccgccgccaccgtgttcaccgacgaggtggcccagagcatcagcctgggcgaggcccagcacgccatcgagagcggcctgatccagatcagcgacatcacccccatcggcgaggtgatcaacggcacccaccagggcaggaccagcgaggacgagatcaccctgttcgacggcaccggcgtgggcctgcaggacctggccgtggccagcgccgccgccgacctggccgaggcccagggcaaggccaacttcatcgacctg

SEQ ID NO: 29 - DNA, 963 bp, Oceanicola flagellatus CGMCC 1.12644
atgctgatcgtgcccgagagggagatcgccaacctgatgaccaggagcgccgccttcgacgccgtggagagcgtgttcgccgccatggccagcaagaacgcctacaacttccccgtgatcagggaggccatcggccacgaggacgccctgtacggcttcaagggcggcttcgacaagcagggcatgaccctgggcctgaaggccggcggctactggcccaacaacctggagaagcacggcgtgatcaaccaccagagcaccatcttcctgttcgaccccgacaccggcatggtgaaggccatggtgggcggcaacctgctgaccgccctgaggaccgccgccgccagcagcgtgagcatcaagcacctggccaggaaggacgccaaggtgatgggcatggtgggcgccggccaccaggccaccttccagctgagggccgccctggagcagaggcccttcgagaaggtgatcggctggaactaccaccccgagatgctgcccaacatcgagaaggtggccaacgaggccggcgtgcccttcgaggccgtggagctggacggcatggtggaggccgacgtggtgatcagcatcaccagcaccttcgagcccaccgtgatggccaagcacatcagccccggcacccacatcgcctgcatgggcaccgacaccaagggcaagcaggaggtggaggccgccctgctgggcaaggccaccgtgttcaccgacgaggtggcccagagcatcaccatcggcgaggcccagcacgccatctacaaccacatgatcaggcccgagaacatcgtgcagatcggcgaggtgatcaacggcacccacaagggcaggaccagcgacgacgagatcaccctgttcgacggcaccggcgtgggcctgcaggacctggccgtggccgccagcgtggtggagctggccgtgaagaacggcgtggccatcgaggtggacttc

SEQ ID NO: 30 - DNA, 963 bp, Phaeobacter inhibens S4Sm
atgaggatcgtgcccgaggccatcatcaaggaccacatcagcagggaggacagcttcgaggccgtggagcaggtgttcgccagcatggccgccaggagcgcctacaacttccccgtgatcagggaggccatcggccacgccgacgccctgtacggcttcaagagcggcttcgacaggaacgccctgaacctgggcctgaagagcggcggctactggcccggcaacagcgagaagggcctgaccaaccaccagagcaccgtgttcctgttcgacgccgacaccggcaagtgcagcgccatcgtgggcggcaacctgctgaccgccctgaggaccgccgccgccgccgccgtgagcgtggcccacctggccaggaaggacgccgaggtgctgggcatcgtgggcgccggccaccaggccagcttccagctgagggccgtggccgagcagagggacttcaagaaggtggtggcctggaacaggagccccgagaagctggccaccctggagcaggtggccagggagctgggcctgcccttcgaggccgtgagcgtggaggacctgtgcgcccagagcgacgtgatcgtgaccatcaccagcagcttcgacgccatcatccacagcgaccaggtgaggcccggcacccacatcgcctgcatgggcaccgacaccaagggcaagcaggaggtggacgccgccctggtggccaggagcagcgtgttcaccgacgagatcgcccagagcaccaccatcggcgaggcccagcacgccgtggccatcggcagcctgagcgaggccgccatcgtggagctgggcgccgtgatcaacggcgcccaccccggcaggggcagcgccgacgaggtgaccctgttcgacggcaccggcgtgggcctgcaggacctggccgtggccgccaccgtggtggagagggccagcaaggccggcgccgccatcgacgtggacttc

SEQ ID NO: 31 - DNA, 963 bp, Brevirhabdus pacifica DSM 27767
atgtacgtggtgcccgagagcgccatcgccgacctgatcagcccccaggacagcttcgaggccgtggagagcgtgttcgccgccatggccaggaaggacgcctacaacttccccgtgatcagggaggccatcggccacgccgacgccctgtacggcttcaagagcggcttcgacagggccggcctggtgctgggcctgaaggccggcggctactggcccggcaacgccgacaagggcctgaccaaccaccagagcagcgtgttcctgttcgaccccgacaccggcaggcccaccgccatggtgggcggcaacctgctgaccgccctgaggaccgccgccgccagcgccgtgagcatcaggtacctggcccccaagggcgccaaggtgctgggcatgatcggcgccggccaccagagcgccttccagatgagggccgccgccaagcagagggacttcgagaaggtgatcggctggaacttccaccccgagatgctgagcaggctggaggagaccgccgccgagctgggcctgccctacgagagcgtggacctggacaggatgggcgccgaggccgacgtgatcgtgagcatcaccagcagcttcgaccccatcctgaaggacgcccaggtgaagggcggcacccacctggcctgcatgggcaccgacaccaagggcaagcaggaggtggaggccgccctgctggccagggccagggtgttcaccgacgagatcgcccagagcatcaccatcggcgaggcccagcacgccgtggccgacggcagcctggccgagagcgacatcaccgagatcggcgccgtgatcgccggcatggaccccggcaggaggagcgacgacgagatcaccctgttcgacggcaccggcgtgggcctgcaggacctggccgtggccgccaaggccgtggagctggccagggagaggggcatcggccaggagatcgaggtg

SEQ ID NO: 32 - DNA, 963 bp, Methylobacterium radiotolerans SB3
atgatcatcgtgcccgagcacgccatcgacggcctgctgaccgaggccgagtgcttcggcgccgtggagcaggtgttcgccagcatggccaggaggagggccggcaacttccccgtggtgagggaggccatcggccacgccgacgccctgtacggcttcaagagcggcttcgacagggacagcctggccctgggcctgaaggccggcggcttctggcccggcaacgccgccaagggcctgaccaaccaccagagcaccgtgttcctgttcgacgccgacaccggcaggtgcagggccgtggtgggcggcaacctgctgaccgccctgaggaccgccgccgcctgcgccatcagcatcaggcacctggccagggagggcgccagggtgctgggcatgatcggcgccggccaccagagcgccttccagctgagggccgccctggtgcagaggcccttcgagagggtgctggcctggaacctgcaccccggcatgttcggcaggatggaggccgtggccagggagaggggcgtgcccttcgaggtggtggacctggacaggctgggcgccgaggccgacgtggtggtgaccatcaccagcagcttcgcccccatcctgaaggccgcccaggtgaggcccggcacccacgtggcctgcatgggcaccgacaccaggggcaagcaggaggtggaggccgagctgctggccgccgccaccgtgttcaccgacgaggtggcccagagcgtgagcctgggcgaggcccagcacgccgtggccaggggcctgctggccgccgacagcatcgtggagatcggcgccgtgatcaacggcgaccaccccggcagggtgagcgacgccgagatcaccgtgttcgacggcaccggcgtgggcctgcaggacctggccgtggccgccgtggccgtggacagggccctggccaagggcctggccaccgaggtgggcttc

SEQ ID NO: 33 - DNA, 963 bp, Pelagimonas varians DSM 23678
atgctgatcgtgcccgagagggacatcgccgacctgatgaccagggacgccgccttcgacgccgtggagagggtgttcgccgccatggccgccggcgacgcctacaacttccccgtggtgagggaggccatcggccacgaggaggccctgtacggcttcaagggcggcttcgaccagagcggcctgaccctgggcctgaaggccggcggctactggcccaacaacctggagaagaggggcatcatcaaccaccagagcaccatcttcctgttcgaccccgacaccggcaaggtgaaggccatgatcggcggcaacctgctgaccgccctgaggaccgccgccgccagcagcgtgagcatcaagcacctggccaggcccgacgccaaggtgatcggcatgatcggcgccggccaccaggccaccttccagctgagggccgccctggagcagaggaacttcgagaaggtgatcggctggaactaccaccccgacatgctgcccaacatcgagaagatcgccaccgaggccggcgtgcccttcgaggccgtggagctggagggcatgaggcaggccgacgtgatcatcagcatcaccagcgccttcgcccccagcctgatggccgaccacgtggcccccggcacccacgtggcctgcatgggcaccgacaccaagggcaagcaggaggtggaggccgccctgctggccaaggccgccgtgttcaccgacgaggtggcccagagcatcaccatcggcgaggcccagcacgccgtggcccagggcctgatcgccgaggccgacgtggcccagctgggcgccgtgatcaacggcaccgacgccggcaggaccagcgaggaccagatcaccctgttcgacggcaccggcgtgggcctgcaggacctggccgtggccgccgccgtggtggacctggccgtggagcagggcatcgccatcgaggtggacttc

SEQ ID NO: 34 - DNA, 963 bp, Thalassobius mediterraneus 5120
atgcacatcgtgcccgagagggacatcgccgacctgatgaccagggccgccgccttcgacgccgtggagaaggtgttcgccgccatggccgccgaggacgcctacaacttccccgtgatcagggaggccctgggccacgaggaggccctgtacggcttcaagggcggcttcgacagggccggcagcaccctgggcctgaaggccggcggctactggccccacaacctggagaagaggggcctgatcaaccaccagagcaccgtgttcctgttcgaccccgacaccggcaaggtgagcgccatggtgggcggcaacctgctgaccgccctgaggaccgccgccgccagcagcgtgagcatcaagcacctggccagggaggacgccaaggtgatcggcatggtgggcgccggccaccaggccaccttccagctgagggccgccctggagcagaggagcttcgagaaggtgatcggctggaacctgcaccccgagatgctgcccaacctggagaaggtggccgccgaggccggcctgcccttcgaggccgtggacctgcccggcctgaaggaggccgacgtggtgatcaccatcaccagcagcttcgaccccatcgtgctgagcgagcacatcagcgacggcacccacgtggcctgcatgggcaccgacaccatcggcaagcaggaggtggccgccgacctgctgaccagggccaccgtgttcaccgacgaggtggcccagagcaccaccctgggcgaggcccagcacgccgtggccaacggcagcctgaccgccgaccagatcacccagctgggcgccgtgatcaacggcacccacggcggcagggccagcgacagggaggtgaccctgttcgacggcaccggcgtgggcctgcaggacctggccgtggccgccagggtggtggagctggccatcgagaagggcaccgccatcgaggtggacttc

SEQ ID NO: 35 - DNA, 963 bp, Jannaschia sp. CCS1
atgtacatcgtgcccgagagggccatcgccgacctgatgaccagggaggccgccttcgacgccgtggagaaggtgttcgccgccatggccgccggcgacgcctacaacttccccgtggtgagggaggccatcggccacgaggacgccctgtacggcttcaagggcggcttcgaccaggccggcctgaccctgggcctgaaggccggcggctactggcccaacaacctggagaagagggacctgatcaaccaccagagcaccgtgttcctgttcgaccccgacaccggcaaggccaaggccatggtgggcggcaacctgctgaccgccctgaggaccgccgccgccagcagcgtgagcatcaagcacctggccagggacgacgccaaggtgatcggcatgatcggcgccggccaccaggccaccttccagctgagggccgccctggagcagaggaccttcgagaaggtgatcggctggaactaccaccccgacatgctgcccaacatcgagaaggtggccaccgaggccggcgtgcccttcgaggccgtggacctgcccggcatggccgaggccgacgtgatcatcagcatcaccagcgccttcgcccccagcctgatggccgaccacgtggcccccggcacccacatcgcctgcatgggcaccgacaccaagggcaagcaggaggtggaggccgccctgctggccagggccaccgtgttcaccgacgaggtggcccagagcgtgagcatcggcgaggcccagcacgccgtggccgacggcctgatcgccgagggcgacgtgcaccagctgggcgccgtgatcaacggcacccacgccggcagggccagcgccgacgagatcaccctgttcgacggcaccggcgtgggcctgcaggacctggccgtggccgccagcgtggtggacctggccatcaagaagggcgtggccatcgaggtggacttc

SEQ ID NO: 36 - DNA, 963 bp, Mesorhizobium sp. BNC1
atgatcatcgtgcccgagagggagatcagcggcctgatcagcgccgccgactgcttcaccgccgtggagcaggtgttcgccagcatggccaggaagagcgccaccaacttccccgtgatcagggaggccatcggccacgccggcgccctgtacggcttcaagagcggcttcgacagggagagcctggccctgggcctgaagagcggcggcttctggcccaacaacgtggagaagggcctgaccaaccaccagagcaccatcttcctgttcgacgccgacaccggcaggtgcagggccgtggtgggcggcaacctgctgaccgccctgaggaccgccgccgccagcgccgtgagcatcaagtacctggccaggagggacgcccaggtgatcggcatcgtgggcgccggccaccagagcaccttccagctgagggccgccctggaccagagggccttcaagaaggtggtgggctggaacatcgaccccgagatgctgagcaggctgcaggtggtggccgccgagaggaacatccccttcgagagcgtggacctggacaggctgggcgccgaggccgacgtgatcatcaccatcaccagcagcttcgccagcctgctgaaggccgcccaggtgaggcccggcacccacctggcctgcatgggcaccgacaccaagggcaagcaggaggtggaggccgagctggtggccatggccaccgtgttcaccgacgaggtggcccagagcatcagcatcggcgaggcccagcacgccgtggagaagggcctgctggccgccggcgacatcatcgagctgggccaggtgatcaacggcatgcaccccggcaggagcagcgacgacgagatcaccctgttcgacggcaccggcgtgggcctgcaggacctggccgtggccagcgccgccgtggacctggccatcgccaggggcgtggccctggaggtggacttc

SEQ ID NO: 37 - DNA, 963 bp, Mesorhizobium sp. BNC1 plasmid 1
atgatcatcgtgcccgagaggctgatcagcgacctgatgagcgaggccgccgtgttcgaggccatcgagagcgtgttcgccgccatggccagggacgaggccaggaacttccccgtgatcagggaggccatcggctacgccgacgccctgtacggcttcaaggccggcttcgacagcgccggcctggtgctgggcgtgaaggccggcggctactggcccggcaacatggccaagggcctgaccaaccaccagagcaccgtgctgctgttcgaccccgacaccggcaggatcaaggccgccgtgggcggcaacctgctgaccgccctgaggaccgccgccgccagcgccgtgagcatcaagcacctggccaggcccgacgccagggtgctgggcatggtgggcgccggccaccagagcgccttccagatgagggccgccgtgagggccaggaagttcgacaaggtggtgggctggaacctgcaccccgagatgctgagcaggctggccgacaccgccgtggagctgggcctgcccttcgaggtggtggacctgccccagctgggcgcccaggccgacgtgatcatcaccatcaccagcagcttcgcccccatcctgctgagcggccacatcaggcccggcacccacctggcctgcatgggcaccgacaccaagggcaagcaggaggtggaggccgccctgttccccagggccaggctgttcgccgacgaggtggagcagagcgtgaccatcggcgaggcccagcacgccgtggcccagggcctgatcgccaccggcgacatcacccccctgggcgccgtgatcgccggcctggcccccggcaggaccagccccgaggagatcaccctgttcgacggcaccggcgtgggcctgcaggacctggccgtggccagcgtggccgtggacatcgccagggccaggggcctggccctggaggtggagctg

SEQ ID NO: 38 - DNA, 999 bp, Roseovarius sp. TM1035
atgaacacccacaaggaggtggccgccgacggcttcgtgatcgtgggcgaggagatctgccagaagatcatcagcagggccgacgccttcggcgccgtggaggccgtgttcgccgccatggccaggggcgacgcctacaacttccccgtggtgagggaggccatcggccacgccgacgccctgtacggcttcaagggcggcttcgacaggagcggcctgagcctgggcctgaaggccggcggctactggcccggcaacatggacaagggcctgaccaaccaccagagcaccgtgttcctgttcgaccccgacaccggcaggctgagcgccctggtgggcggcaactacctgaccgccatcaggaccgccgccagcagcagcgtgagcatcgcccacctggccaggaaggacgccaaggtgctgggcatggtgggcgccggccaccagagcgccttccagctgagggccgccgtggagcagagggccttcgagaaggtggtggcctggaacccccaccccgacatgctgcccaggctgggcgccgtggccaaggagctgggcctggagttcgaggccgtgacccaggaggagctgggcgcccaggccgacgtgatcatcaccatcaccagcgccttcgagcccctgatgatggccgactgggtgaagcccggcacccacatcgcctgcatgggcaccgacaccaagggcaagcaggaggtggaccccgccctgttcaccagggccaccgtgttcgccgacgagatcgcccagagcatcaccatcggcgaggcccagcacgccgtgggcaagggcctgatcgccgagggcgacatcacccccatcggcgccgtgatcaacggcacccacggcggcaggagcaacgccgaggagatcaccctgttcgacggcaccggcgtgggcctgcaggacctggccgtggccagcgtggccgccaagctggccagggagcagggcctggtgacccccatcaccctgggc

SEQ ID NO: 39 - DNA, 963 bp, Methylobacterium radiotolerans JCM 2831 plasmid pMRAD01
atgatcatcgtgcccgagcacgccatcgacggcctgctgaccgaggccgagtgcttcggcgccgtggagcaggtgttcgccagcatggccaggaggagggccggcaacttccccgtggtgagggaggccatcggccacgccgacgccctgtacggcttcaagagcggcttcgacagggacagcctggccctgggcctgaaggccggcggcttctggcccggcaacgccgccaagggcctgaccaaccaccagagcaccgtgttcctgttcgacgccgacaccggcaggtgcagggccgtggtgggcggcaacctgctgaccgccctgaggaccgccgccgcctgcgccatcagcatcaggcacctggccagggagggcgccagggtgctgggcatgatcggcgccggccaccagagcgccttccagctgagggccgccctggcccagaggcccttcgagagggtgctggcctggaacctgcaccccggcatgttcggcaggatggaggccgtggccagggagaggggcgtgcccttcgaggtggtggacctggacaggctgggcgccgaggccgacgtggtggtgaccatcaccagcagcttcgcccccatcctgaaggccgcccaggtgaggcccggcacccacgtggcctgcatgggcaccgacaccaggggcaagcaggaggtggaggccgagctgctggccgccgccaccgtgttcaccgacgaggtggcccagagcgtgagcctgggcgaggcccagcacgccgtggccaggggcctgctggccgccgacagcatcgtggagatcggcgccgtgatcaacggcgaccaccccggcagggtgagcgacgccgagatcaccgtgttcgacggcaccggcgtgggcctgcaggacctggccgtggccgccgtggccgtggacagggccgtggccaagggcctggccaccgaggtggacttc

SEQ ID NO: 40 - DNA, 1041 bp, Rhizobium sp. NGR234 plasmid pNGR234b
atggcctgcctgggcagcggccagggcgtgctgaccaaggagggccacaggcccagctgcaaccagagcgagggcaagatgatcatcgtgcccgagagccagatccccgccctggtgaccagcgccgactgcttcgtggccgtggaggacgtgttcgccagcatgagcaagcagagcgcctacaacttccccgtgatcagggaggccatcggccacgccgacgccctgtacggcttcaagagcggcttcgacagggagagcctggccctgggcctgaagagcggcggcttctggcccaacaacatccacaagggcctggccaaccaccagagcaccgtgttcctgttcgacgccgacaccggcaagtgcagggccatcgtgggcggcaacctgctgaccgccctgaggaccgccgccgccagcgccgtgagcatcaagtacctggccaggcaggacgccaaggtgctgggcatgatcggcgccggccaccagagcacctaccagctgagggccgccgtggagcagaggcccttcgagaaggtgctggcctggaacttccaccccgagatgctgagcaggctggaggacgtggccaaggagctggagctgcccttcgagaccgtggacctggacaggctgggcgccgaggccgacgtgatcatcagcatcaccagcagcttcgcccccatcctgaaggccagccaggtgaggcccggcacccacctggcctgcatgggcaccgacaccaagggcaagcaggagatggacgccgacctggtggccggcgccaccgtgttcgccgacgaggtggcccaggccgtgaccatcggcgagtgccagcacgccttcgagaagggcctgatcaccagggacgacatcatcgagctgggcgccgtgatcaccggcaggcaccccggcaggagcagccccgaggagatcaccctgttcgacggcaccggcgtggccctgcaggacctggccgtggccagcgccgccgtggagctggccctgagcaggggcaccgccatcgaggtggacttc

SEQ ID NO: 41 - DNA, 963 bp, Citreicella sp. SE45 genomic scaffold scf_1113211290443
atgctgatcgtgcccgagagggagatcgccgacctgatgaccagggaggccgccttcagcgccgtggagcaggtgttcgccgccatggccgccggcaacgcctacaacttccccgtggtgagggaggccatcggccacgaggacgccctgtacggcttcaagggcggcttcgacagggccggcctgaccctgggcctgaaggccggcggctactggccccacaacctggagaagaggggcatgatcaaccaccagagcaccgtgttcctgttcgaccccgacaccggcaaggccaaggccatggtgggcggcaacctgctgaccgccctgaggaccgccgccgccagcagcgtgagcatcaggcacctggccagggaggacgccaaggtgatcggcatggtgggcgccggccaccaggccaccttccagctgagggccgccctggagcagagggacttcgacaaggtgatcggctggaacctgcaccccgagatgctgcccaacctggagaaggtggccgccgaggccggcctgcccttcgaggccgtggagctggagggcatgagggccgccgacgtgatcatcagcatcaccagcagcttcgacgccatcctgatggaggagcacgtggcccccggcacccacatcgcctgcatgggcaccgacaccaagggcaagcaggaggtggcccccgccctgctggccaaggccaccgtgttcaccgacgaggtgagccagagcgtgagcatcggcgaggcccagcacgccgtggcccagggcctgatcagggagaccgacatcagccagctgggcgccgtgatcaacggcgcccaccccggcaggaggagcgccgaggagatcaccctgttcgacggcaccggcgtgggcctgcaggacctggccgtggccgccgccgtggtggacctggccgtggagaagggcatcgccatcgaggtggacttc

SEQ ID NO: 42 - DNA, 963 bp, Citreicella sp. SE45 genomic scaffold scf_1113211290440
atgctgatcgtgcccgagagggagatcggcgccctgatgaccagggccagcgccttcgaggccgtggagaaggtgttcgccgccatggccagcggcgaggcctacaacttccccgtgatcagggaggccatcggccacgaggacgccctgtacggcttcaagggcggcttcgacagggccggcctgaccctgggcctgaaggccggcggctactggcccaacaacctggagaagttcaaggtgatcaaccaccagagcaccgtgttcctgttctaccccgacaccggcaaggtggccgccatggtgggcggcaacctgctgaccgccctgaggaccgccgccgccagcagcgtgagcatcgcccacctggccaggagggacgccaaggtgatgggcatggtgggcgccggccaccaggccaccttccagctgagggccgccctggagcagaggcccttcgagaaggtgatcggctggaacctgcaccccgagatgctgcccaacatcgagaccgtggccgacgaggccggcctgcccttcgaggccgtgcccctggagggcatgagggaggccgacgtgatcgtgagcatcaccagcagcttcgcccccagcctgatggccgcccacgtgagccccggcacccacctggcctgcatgggcaccgacaccaggggcaagcaggaggtggaggccgccctgctggccgtggccaccgtgttcaccgacgaggtggcccagagcgtgagcatcggcgaggcccagcacgccgtggccgagggcctgatcagcgagagcgacgtgcaccagatcggcgccgtgatcaacggcagccaccccggcaggaggagcgacgaggagatcaccctgttcgacggcaccggcgtgggcctgcaggacctggccgtggccgccgccgtggtggacctggccgtggagaagggcatcgccatcgaggtggacgtg

SEQ ID NO: 43 - DNA, 963 bp, pCaer_C109
atgtacatcgtgcccgagaaggccatcgccgacctggtgaccagggaggccagcttcgacgccgtggagaaggtgttcgccgccatggccgccggcgacgcctgcaacttccccgtggtgagggaggccatcggccacgaggacgccctgtacggcttcaagggcggcttcgacagggccggcctgaccctgggcctgaaggccggcggctactggcccaacaacctggagaagaggggcctgatcaaccaccagagcaccgtgttcctgttcgaccccgacaccggcaaggtgaaggccatggtgggcggcaacctgctgaccgccctgaggaccgccgccgccagcagcgtgagcatcaagcacctggccaggcaggacgccaaggtgatcggcatgatcggcgccggccaccaggccaagttccagctgagggccgccctggagcagagggagttcgagaaggtgatcggctggaacctgcaccccgagatgctgcccaacctgcaggaggtggccgacgaggccggcctgcccttcgaggccgtggagctggacggcatgagggaggccgacgtgatcatcagcatcaccagcagcttcgacgccatcctgaaggccgaccaggtgagccccggcacccacatcgcctgcatgggcaccgacaccaagggcaagcaggaggtggacccccagctgctggtgaaggccgacgtgttcaccgacgaggtggcccagagcatcagcatcggcgaggcccagcacgccgtgacccagggcctgatccaggaggccgacgtggcccagatcggcgccgtgatcaacggcaccaaccccggcaggaccagcgacgaccagatcaccctgttcgacggcaccggcgtgggcctgcaggacctggccgtggccgccagcgtggtggacgtggccgtggagaagggcgtggccatcgaggtggacttc

SEQ ID NO: 44 - DNA, 879 bp, Ensifer fredii USDA257
atggccaagaggagcgcctacaacttccccgtgatcagggaggccatcggccacgccgacgccctgtacggcttcaagagcggcttcgacagggacagcctggccctgggcctgaagagcggcggcttctggcccaacaacgtgcagaacggcctggccaaccaccagagcaccgtgttcctgttcgacgccgacaccggcaggtgcagggccgtggtgggcggcaacctggtgaccgccctgaggaccgccgccgccagcgccgtgagcatcaagtacctggccaggaagaacgccaaggtgctgggcatgatcggcgccggccaccagagcacctaccagctgagggccgccgtggagcagaggcccttcgagaaggtgctggcctggaacctgcaccccgagatgctgagcaggctggagggcgtggccagggagctggagctgcccttcgagaccgtggacctggacaggctgggcgacgaggccgacgtgatcatcagcatcaccagcagcttcgcccccatcctgaaggccagccaggtgaggcccggcacccacctggcctgcatgggcaccgacaccaagggcaagcaggagatggacgccgagctgatcgccgccgccaccgtgttcaccgacgaggtggcccaggccgtgaccatcggcgagtgccagcacgccatcgagaagggcctgatcagcaaggacgacatcgtggagatcggcgccgtgatcaccggcaggcacaagggcaggagcagccccgaggagatcaccatgttcgacggcaccggcgtggccctgcaggacctggccgtggccagcgccgccgtggcccacgccgtgagcaggggcaccgccatcgaggtggacttc

SEQ ID NO: 45 - DNA, 960 bp, Paracoccus pantotrophus J46 ICCP
atgctggtggtggccgagaaggagatcgccggcctgatgacccccgaggccgccttcgaggccatcgaggccgtgttcgccagcatggccaggaggaaggcctacaacttccccgtggtgagggaggccatcggccacgaggacgccctgtacggcttcaagggcggcttcgacgccgccgccctgaccctgggcctgaaggccggcggctactggcccaacaaccagaagcacggcctgatcaaccaccagagcaccgtgttcctgttcgaccccgacaccggcagggtgagcgccgccgtgggcggcaacctgctgaccgccctgaggaccgccgccgccagcgccgtgagcatcaagcacctggcccccaagggcgccaaggtgctgggcatgatcggcgccggccaccagagcgccttccagatgagggccgccgccaacgtgcacaggttcgagaaggtgatcggctggaacccccaccccgagatgctgagcaggctggccgacaccgccgccgagctgggcctgcccttcgaggccgtggagctggacaggctgggcgccgaggccgacgtgatcatcagcatcaccagcagcttcagccccctgctgctgaacgagcacgtgaagggccccacccacatcgccgccatgggcaccgacaccaagggcaagcaggagctggaccccgccctggtggccagggccagggtgttcaccgacgaggtggcccagagcgtgagcatcggcgagtgccagcacgccatcgccagcggcctgatcagggaggaccagatcggcgagctgggcgccgtggtggccggcgacgaccccggcaggggcgacgccgaggtgaccatcttcgacggcaccggcgtgggcctgcaggacctggccgtggcccagaaggtgctggagatcgccaagcaggagggcctggcccaggaggtggagatc

SEQ ID NO: 46 - DNA, 960 bp, Paracoccus sp. J4
atgctggtggtggccgagaaggagatcgccggcctgatgacccccgaggccgccttcgaggccatcgaggccgtgttcgccagcatggccaggaggaaggcctacaacttccccgtggtgagggaggccatcggccacgaggacgccctgtacggcttcaagggcggcttcgacgccagcgccctgaccctgggcctgaaggccggcggctactggcccaacaaccagaagcacaacctgatcaaccaccagagcaccgtgttcctgttcgaccccgacaccggcagggtgagcgccgccgtgggcggcaacctgctgaccgccctgaggaccgccgccgccagcgccgtgagcatcaagtacctggcccccaagggcgccaaggtgctgggcatgatcggcgccggccaccagagcgccttccagatgagggccgccgccaacgtgcacaggttcgagaaggtgatcggctggaacccccaccccgagatgctgagcaggctggccgacaccgccgccgagctgggcctgcccttcgaggccgtggagctggacaggctgggcaccgaggccgacgtgatcatcagcatcaccagcagcttcagccccctgctgatggaccagcacgtgaagggccccacccacgtggccgccatgggcaccgacaccaagggcaagcaggagctggaccccgccctggtggccagggccagggtgttcaccgacgaggtggcccagagcgtgagcatcggcgagtgccagcacgccatcgccagcggcctgatcagggaggaccagatcggcgagatcggcgccgtggtggccggcgacaaccccggcaggggcgacgccgaggtgaccatcttcgacggcaccggcgtgggcctgcaggacctggccgtggccaaggccgtggtggagctggccaagcacaagggcgtggcccaggaggtggagatc

SEQ ID NO: 47 - DNA, 981 bp, Solemya velum gill symbiont
atggaggccgagaagggcgtggtggtggtgagcgaggccacctgcgaggaggtgatcgacagggccagcagcttcaccgccgtggagagcgtgttcgccgccatggccaggggcgacgcctacaacttccccgtggtgagggaggccatcggccacgccgacgccctgtacggcttcaagagcggcttcgacagggccggcatgagcctgggcgtgaagagcggcggctactggcccggcaacgtgaacctgggcatccccaaccaccagagcaccgtgttcctgttcgaccccgacaccggcaggctgaaggccatggtgggcggcaactacctgaccgccgtgaggaccgccgccagcagcgccgtgagcatcaaccacctggccaggaaggacgccaaggtgctgggcatggtgggcgccggccaccagagcaagttccagctgagggccgccgccgaccagagggacttcgagaaggtggtggcctggaacccccaccccgagatgctgcccggcctgaaggccgtggccgacgagctgggcctgcccttcgagagcgtggagagggaggagctgtgcgcccaggccgacgtgatcatcaccatcaccagcgccttcgaggccctgctgatgaaggagtggatcaagcccggcacccacatcgcctgcatgggcaccgacaccaagggcaagcaggaggtggacaccgccctggtggagagcgccaccctgttcaccgacgagatcgtgcagagcatcaccatcggcgagaaccagcacgccatcgagagcggcgccatcagcgagagcgacatcacccccatcggcgacgtgatcaacggcaagcaccccggcaggagccacgccgacgagatcaccctgttcgacggcgccggcgtgggcctgcaggacctggccgtggccagcgtggccgtggacctggccctggagaaggaccaggcccagcacgtgagcctg

SEQ ID NO: 48 - DNA, 960 bp, Paracoccus sp. N5
atgttcgtggtggccgagaaggagatcgccggcctgatgacccccgaggccgccttcgaggccatcgaggccgtgttcgccagcatggccaggaggaaggcctacaacttccccgtggtgagggaggccatcggccacgaggacgccctgtacggcttcaagggcggcttcgacgccagcgccctggtgctgggcctgaaggccggcggctactggcccaacaaccagaagcacaacctgatcaaccaccagagcaccgtgttcctgttcgaccccgacaccggcagggtgagcgccgccatcggcggcaacctgctgaccgccctgaggaccgccgccgccagcgccgtgagcatcaagtacctggcccccaagggcgccaaggtgctgggcatgatcggcgccggccaccagagcgccttccagatgagggccgccgccgccgtgcacggcttcgagaaggtgatcggctggaacccccaccccgagatgctgaccaggctggccgacaccgccgccgacctgggcctgcccttcgaggccgtggagctggacaggctgggcgccgaggccgacgtgatcatcagcatcaccagcagcttcagccccctgctgatggaccagcacgtgaagggccccacccacatcgccgccatgggcaccgacaccaagggcaagcaggagctggaccccgccctggtggccagggccagggtgttcaccgacgaggtggcccagagcgtgaccatcggcgagtgccagcacgccatcgccgccggcctgatcgccgaggaggccatcggcgagctgggcgccgtggtgagcggcgacgaccccggcagggacggcgccgaggtgaccatcttcgacggcaccggcgtgggcctgcaggacctggccgtggcccagaaggtgctggagatcgccaaggagaagggcctggcccaggaggtggagatc

SEQ ID NO: 49 - DNA, 1002 bp, Roseovarius mucosus DSM 17069
atgatgaacacccagcagcaggtggccgccgacggcttcgtgatcgtgggcgaggagatctgccagaagatcatcagcagggccgacgccttcggcgccgtggaggccgtgttcgccgccatggccagcggcgacgcctacaacttccccgtggtgagggaggccatcggccacgccgacgccctgtacggcttcaagggcggcttcgacaggagcggcctgagcctgggcctgaaggccggcggctactggcccggcaacatggacaagggcctgaccaaccaccagagcaccgtgttcctgttcgaccccgacaccggcaggctgagcgccctggtgggcggcaactacctgaccgccatcaggaccgccgccagcagcagcgtgagcatcgcccacctggccaggaaggacagcaaggtgctgggcatggtgggcgccggccaccagagcaccttccagctgagggccgccgtggagcagagggccttcgagaaggtggtggcctggaacccccaccccgacatgctgcccaggctgggcgccgtggccaaggagctgggcctggagttcgaggccgtgacccaggaggagctgggcgcccaggccgacgtgatcatcaccatcaccagcgccttcgagcccctgatgatggccgactggatcaagcccggcacccacatcgcctgcatgggcaccgacaccaagggcaagcaggaggtggaccccgccctgttcaccagggccaccgtgttcgccgacgagatcgcccagagcatcaccatcggcgaggcccagcacgccgtggccaagggcctgatcgccgagggcgacatcacccccatcggcgccgtgatcaacggcacccacggcggcagggccagcgaggccgagatcaccctgttcgacggcaccggcgtgggcctgcaggacctggccgtggccagcgtggccgccaagctggccagggagcagggcctggtgacccccatcaccctgggc

SEQ ID NO: 50 - DNA, 1002 bp, Marinobacter sp. BSs20148
atggacaccagcagcgaggccctgacccagccccaccagatcctgatcgtgagcgaggacgcctgccagaaggtgatcggcaggcacgaggccttccaggccgtggagagcgtgttcagcagcatggccaagggcagcgcctacaacttccccgtggtgagggaggccatcggccacgccaacgccctgtacggcttcaagagcggcttcgacagcgagggcctggtgctgggcgtgaaggccggcggctactggcccggcaacgtggtgcagggcaggaccaaccaccagagcatcgtggccctgttcgaccccgacaccggccagctgaaggccctgatcggcggcaactacctgaccgccatcaggaccgccgccagcagcgccgtgagcatcgcccacctggccaggaagaacgccaaggtgctgggcatgatcggcgccggcttccagagcaccttccagctgcacgccgccctggagcagagggacttcgagaaggtggtggcctggaacacccaccccgagcacctgaccaggctggccgacgtgtgcagggagcacggcctgcccttcgaggccgtgagcctgcagaccctgggcgcccagagcgacgtgatcatcaccatcaccagcgccagcgagcccctgctgcaggccgcctggatcaagcccggcacccacctggcctgcatgggcaccgacaccaagggcaagcaggaggtggaccagcagctgctggccagggccagcgtgttcaccgacgagatcgcccagagcatcagcatcggcgaggcccagcacgccgtggccgccaagatcctgttcgccgagcagatcacccccatcggcgaggtgatcaacggcagccaccagggcaggcagagcgagcaggagatcaccctgttcgacggcaccggcgtgggcctgcaggacctggccgtggccagcgccgccgccagcctggccgaggtgaggggcctggcccagagggtgaccctg

SEQ ID NO: 51 - DNA, 963 bp, Ensifer sp. USDA 6670, CC2017
atgatcatcgtgcccgagaaccagatcgccgagctgatcacccccgccgactgcctggtggccgtggagggcgtgttcgccagcatggccaagaggagcgcctacaacttccccgtgatcagggaggccatcggccacgccgacgccctgtacggcttcaagagcggcttcgacagggagagcctggccctgggcctgaagagcggcggcttctggcccaacaacgtgagggagggcctggccaaccaccagagcaccgtgttcctgttcgacgccgacaccggcaggtgcagggccatcgtgggcggcaacctgctgaccgccctgaggaccgccgccgccagcgccgtgagcatcaagtacctggccaggaaggacgccaaggtgctgggcatgatcggcgccggccaccagagcacctaccagctgagggccgccgtggagcagaggcccttcgagaaggtgctggcctggaacctgcaccccgagatgctgagcaggctggagggcgtggccagggagctggagctgcccttcgagaccgtggacctggacaggctgggcgccgaggccgacgtgatcatcagcatcaccagcagcttcgcccccatcctggaggccagccaggtgaggcccggcacccacctggcctgcatgggcaccgacaccaagggcaagcaggagatggacgccgagctgctggccgccgccaccgtgttcaccgacgaggtggcccaggccgtgaccatcggcgagtgccagcacgccatcgagaagggcctgatcagcagggacaacatcgtggagatcggcgccgtgatcaccggctgccacaccggcaggagcagccccgaggagatcaccctgttcgacggcaccggcgtgggcctgcaggacctggccgtggccagcgccgccgtggagctggccctgagcaagggcaccgccatcgaggtggacttc

SEQ ID NO: 52 - DNA, 963 bp, Rhizobium etli CNPAF512
atgatcatcgtgcccgagagcgccatcggcgagctgatcagcctggaggactgcgtggacgccgtggagaaggtgttcgtgagcatggccgagaggagcgcccacaacttccccgtggtgagggaggccatcggctacgccgacgccctgttcggcttcaagagcggcttcgacagggagggcctggccctgggcctgaaggccggcggcttctggcccaacaacgccgacaagggcctgaccaaccaccagagcaccgtgttcctgttcgaccccgagaccggcaggtgcagggccgtggtgggcggcaacctgctgaccgccctgaggaccgccgccgccagcgccgtgagcatcaagcacctggccaggagggacgccaaggtgctgggcatggtgggcgccggccaccaggccagcttccagctgagggccgccgtgcagcagaggcagttcgagaaggtggtggcctggaactaccaccccgagatgctgcccaagctggccgccgtggccgaggagctggccgtgcccttcgaggccgtggacctggacaggctgggcgacgaggccgacgtgatcatcaccatcaccagcagcttccagcccatcctgaaggccagccagatcaggcccggcacccacctggcctgcatgggcaccgacaccaagggcaagcaggaggtggaccccgccctggtggccgccgccaccctgttcaccgacgagatcgcccaggccatcagcatcggcgagtgccagcacgccgtggcccagggcatgatcgcccccatcgacatcgccgagatcggcgccgtgatcaacggccagaagagcggcaggaccagcctggaggaggtgaccctgttcgacggcaccggcgtgggcctgcaggacctggccgtggcccaggccgccgtggagctggccctggccaggggcatcgccgtggaggtggacttc

SEQ ID NO: 53 - DNA, 963 bp, Sulfitobacter sp. 20_GPM-1509m
atgctgatcgtgcccgagagggagatcgccaacctgatgaccagggccgccgccttcgacgccgtggagcaggtgttcgccgccatggccgccggcgacgcctacaacttccccgtggtgagggaggccatcggccacgaggacgccctgtacggcttcaagggcggcttcgacagggccggcctgaccctgggcctgaaggccggcggctactggcccaacaacctggagaagagggacctgatcaaccaccagagcaccgtgttcctgttcgaccccgacaccggcaaggccagggccatggtgggcggcaacctgctgaccgccctgaggaccgccgccgccagcagcgtgagcatcaagcacctggccaggaaggacgccagggtgatcggcatggtgggcgccggccaccaggccaccttccagctgagggccgccctggagcagagggacttcgacaaggtgatcggctggaactaccaccccgagatgctgcccaacatcgagaagatcgccagggaggccggcgtgcccttccaggccgtggacctgcccggcatggtggaggccgacgtgatcatcagcatcaccagcgccttcagccccagcctgatggccgaccacgtggcccccggctgccacctggcctgcatgggcaccgacaccaagggcaagcaggaggtggaggccgccctgctggccagggccaccgtgttcaccgacgaggtggcccagagcgtgagcatcggcgaggcccagcacgccgtggccgagggcctgatcgccgagagcgacgtgcaccagctgggcgccgtgatcaacggcacccacgccggcagggtgagcgacgaccagatcaccctgttcgacggcaccggcgtgggcctgcaggacctggccgtggccgccgccgtggtggacctggccgtggcccagggcatcgccatcgaggtggacttc

SEQ ID NO: 54 - DNA, 963 bp, Maribius sp. MOLA 401
atgctgatcgtgcccgagagggagatccccgacctgctgaccaggggcgccagcttcgacgccgtggagaaggtgttcgccgccatggccgccggcgacgcctacaacttccccgtggtgagggaggccatcgaccacgaggacgccctgtacggcttcaagggcggcttcgacgccaagggccaggtgctgggcctgaaggccggcggcttctggcccaacaacatggagaggaggcagatcatcaaccaccagagcaccgtgttcctgttcgaccccgacaccggcagggtggccgccatggtgggcggcaactacctgaccgccctgaggaccgccgccgccagcagcgtgagcatcaggcacctggccaggggcgacgccaaggtgctgggcatgatcggcgccggccaccaggccagcttccagctgagggccgccctggagcagagggagttcgagagggtgatcgcctggaactaccaccccgagatgctgcccaacctggccaagatctgcgacgaggtgggcgtgcccttccaggccgtggagctggacggcatgagggaggccgacgtgatcgtgagcatcaccagcgccttcgcccccagcctgatggccgaccacgtggcccccggcacccacgtggcctgcatgggcaccgacaccaagggcaagcaggaggtggaggcccagctgctggccagggccaccgtgttcgccgacgaggtggcccagagcgtgagcatcggcgaggcccagcacgccatcgccgagggcctgatcgacaaggccggcatccaccagatcggcgccgtgatcaacggcacccaccccggcaggaggagcgacggcgagatcaccctgttcgacggcaccggcgtgggcctgcaggacctggccgtggccgccgccatcgtggacctggccaaggccaagggcgtggccatcgaggtggagttc

SEQ ID NO: 55 - DNA, 1026 bp, Amphritea atlantica DSM 18887
atgggcggcagcatcgaggagaggagcttcgaggagctgagccccgtggacgccggcgccggcatcagcctggtgagcgaggccgtgtgcgagcaggtggtgggcaggcccgaggccttcaccgccgtggagagcgtgttcgccgccatggccagcggcgccgcctacaacttccccgtggtgagggaggccatcggccacgccgacgccctgtacggcttcaagagcggcttcgacagggccggcatggtgctgggcgtgaagagcggcggctactggcccggcaacgtggacaagaacctgaccaaccaccagagcaccgtgatcctgttcgaccccgacaccggccagctgaggagcctggtgggcggcaactacctgaccgccgtgaggaccgccgccgccagcgccgtgagcatcgcccacctggccaggaaggacgccagggtgctgggcatggtgggcgccggccaccagagcaccttccagctgagggccgccctggagcagaggaacttcgagaaggtggtggcctggaacccccaccccgagtacctgagcaggctggccgccgtgtgcgaggagctgggcatgcccttcgccgccgtggagagggagcagctgggcgccgaggccgacgtgatcatcaccatcaccagcgccttcgagcccctgctgatgaagcagtggatcaagcccggcacccacatcgcctgcatgggcaccgacaccaagggcaagcaggaggtggaccccgagctgctggccagcgccagcgtgttcaccgacgaggtggcccagagcatcagcatcggcgaggcccagcacgccgtggccagcggcctgctgaacgaggccgacatcacccccatcggcgaggtgatcaacggcacccaccccggcaggagggacgacctggagatcaccctgttcgacggcaccggcgtgggcctgcaggacctggccgtggccagcgccgccgtggagctggcccaggccaagggcctggccggccaggtgagcctg

SEQ ID NO: 56 - DNA, 960 bp, Rhodobacteraceae sp. HL-91
atgtggatcgtgcccgagagcgccatcggcggcctggtggacgaccagagcgccttcgacgccgtggaggccaccttcgccgccatggccagggacgacgcctacaacttccccgtggtgagggaggccctgggcgagggcaggcagtacggcttcaagagcggcctggacagggccggcgcccagctgggcgtgaaggccggcggctacttccccggcaacgccgccaagggcatcatcaaccaccagagcaccgtgttcctgttcgaccccgacaccggcatcctgcaggccgccgtgggcggcaacctgctgaccgccctgaggaccgccgccgccagcgccatcagcatcgcccacctgagcagggccgacagcaccgtgctgggcatggtgggcgccggccaccagagcgtgttccagatgagggccgccctgaggcagaggaagttcgagagggtggtggcctggaactaccaccccgacatgatggacaggctggccagcgccgtggccgaggagggcctgcccttcgaggaggtgagcctggaggagctgggcgcccaggccgacgtgatcatcaccatcaccagcagccccgccgccagcctgatggacgcccacgtgaggcccggcacccacatcgcctgcatgggcaccgacaccatcggcaagcaggaggtggaccccgccctgctggccagggccgccgtgttcaccgacgaggtggcccagagcgtgaccatcggcgaggcccagcacgccatcgcccagggcctgatcaagcccgaggacatcacccccatcggcgccgtgatcaacggcgcccacaagggcaggaccagcgccgaggagatcaccctgttcgacggcaccggcgtgggcctgcaggacatcgccgtggccagcaaggccgtggacctggccagggccaacggcagcgccatcgaggtggccctg

SEQ ID NO: 57 - DNA, 963 bp, Methylobacterium sp. UNCCL143
atgatcatcgtgcccgagcacgccatcgacggcctgctgaccgaggccgagtgcttcaccgccgtggagcaggtgttcgccagcatggccaggaggagggccggcaacttccccgtggtgagggaggccatcggccacgccgacgccctgtacggcttcaagagcggcttcgacagggacagcctggccctgggcctgaaggccggcggcttctggcccggcaacgccgccaagggcctgaccaaccaccagagcaccgtgttcctgttcgacgccgacaccggcaggtgcagggccgtggtgggcggcaacctgctgaccgccctgaggaccgccgccgcctgcgccatcagcgtgaggcacctggccaggaaggacgccagggtgctgggcatgatcggcgccggccaccagagcgccttccagctgagggccgccctggcccagaggcccttcgagagggtgctggcctggaacctgcaccccggcatgttcggcaggatggaggccgtggccagggagcacggcgtgcccttcgaggccgtggacctggacaggctgggcagcgaggccgacgtggtggtgaccatcaccagcagcttcgcccccatcctgaaggccgtgcaggtgaggcccggcacccacctggcctgcatgggcaccgacaccaggggcaagcaggaggtggaggccgagctgctggccgccgccaccgtgttcaccgacgaggtggcccagagcgtgagcatcggcgaggcccagcacgccgtggccaggggcctgctggccgccgacagcatcgtggagatcggcgccgtgatcaacggcgaccaccccggcagggtgagcgagagcgagatcaccctgttcgacggcaccggcgtgggcctgcaggacctggccgtggccgccgtggccgtggacagggccgtggccaagggcctggccaccgaggtggaggtg

SEQ ID NO: 58 - DNA, 963 bp, Aquisalimonas asiatica CGMCC 1.6291
atgcagatcgtgagcgagaaggccgtgaaggccgccgtgagcagggccgacgccttcaccgccgtggagagcgtgttcgccgccatggccaccggccaggcctggaacttccccgtggtgagggaggccatcggccacgccgacgccctgtacggcttcaagagcggcttcgacagggaccacatggccctgggcgtgaagagcggcggctactggcccggcaacgccgccaggggcctgaccaaccaccagagcaccgtgctgctgttcgaccccgacaccggccagcccagggccctggtgggcggcaactacctgaccgccgtgaggaccgccgccgccagcgccgtgagcatccagcacctggccaggcccgacgccaagaccctgggcatcgtgggcgccggccaccaggcccccttccagctgagggccgccgtggagcagaggcccatcgagagggtggtggcctggaacaggagccccgagaggctggagagcctgagggaggccgcccaggccatgggcctgcccttcgaggccgtggacagggacaccctgtgcgagcaggccgacgtgatcatcaccatcaccagctgcttcgagcccctgctgaccagggagcagatcaggcccggcacccacatcgcctgcatgggcaccgacaccgccggcaagcaggagatcgaccccgccatcctggccagcgccgaggtgttcaccgacgaccccacccaggccgccaccatcggcgagtgccagcacgccgtggcccagggccacatccacagggacgccatcaggcccgtgggcggcgtgatcggcgagcccggcagcttcaggaggagcgccgaggccatcaccgtgttcgacggcaccggcgtgggcctgcaggacctggccgtggccagggtggccctggagagggccgtggaggccggcaccgccgtgaggatcgacctg

SEQ ID NO: 59 - DNA, 990 bp, Thalassotalea sp. ND16A
atgagcgaccagcacaacaaccagggcgtggtggtggtgaccgaggaggtgtgccaggccatcatgggcaggagcgacgccttcaccgccgtggagaacgtgttcgccgccatgagcaagaacaccgcctacaacttccccgtgatcagggaggccatcggccacgccgacgccctgtacggcttcaagagcggcttcgacagggacagcatggtgctgggcctgaagagcggcggctactggcccggcaacgtggagaagggcctgaccaaccaccagagcaccgtgatcctgttcgaccccgacaccggcaagctgaagagcctggtgggcggcaactacctgaccgccgtgaggaccgccgccagcagcgccgtgagcatcgcccacctggccaggcaggacagcaaggtgctgggcatgatcggcgccggccaccagagcaccttccagctgagggccgccgtggagcagaggaacttcgagaaggtggtgggctggaacatcgaccccgagaggctgagcatcctggccgaggtgtgcgccgagctgagcctgcccttcgagagcgtgagcagggaggagctgtgcgccctgagcgacgtgatcatcaccatcaccagcgccttcgaggccctgctggacaacgcctggatcaagcccggcacccacatcgcctgcatgggcaccgacaccaagggcaagcaggaggtggacgccaagctgttcaggaccgccaccgtgttcaccgacgagctggcccagagcatcaccatcggcgaggcccagcacgccatccagagcggcctgatcgtggagagcgacatcgtgcccatcggcgaggtgatcaacggcaccaacagcggcaggaccagcgaggacgagatcaccctgttcgacggcaccggcgtgggcctgcaggacctggccgtggccagcgtggccgccgagctggcccaggccaagggccaggccttctacatcaacctg

SEQ ID NO: 60 - DNA, 987 bp, Roseovarius lutimaris DSM 28463
atgagcgccaacaccgacgacggcctgctgatcgtgagcgaggagatctgcgagcaggtgatcaggaggcccgacgccttcagcgccgtggaggccgtgttcggcgccatggccaggggcgacgcctacaacttccccgtggtgagggaggccatcggccacgccgacgccctgtacggcttcaagagcggcttcgacagggccggcatggtgctgggcgtgaaggccggcggctactggcccggcaacatggccaagggcctgaccaaccaccagagcaccgtgtgcctgttcgaccccgacaccggcaggctggtggccctggtgggcggcaactacctgaccgccctgaggaccgccgccagcagcgccgtgagcatcgcccacctggccaggaaggacgccaaggtgctgggcatggtgggcgccggccaccagagcaccttccagctgagggccgccgtggagcagagggacttcgagagggtggtggcctggaacccccaccccgacatgctgcccaggctggccgccgtggccgaggagctgggcctggccttcgaggccgtgacccccgagggcctgggcgcccaggccgacgtgatcatcaccatcaccagcgccttcgagcccctgatcatggccgactggatcaagcccggcacccacatcgcctgcatgggcaccgacaccaagggcaagcaggaggtggaccccgccctgttcaagagcgccaccgtgttcgccgacgagatcgcccagagcatcaccatcggcgaggcccagcacgccgtggccagcggcctgatcggcgagggcgacctgaccgccatcggcgaggtgatcaacgccacccaccccggcaggagcagcgacgacgagatcaccctgttcgacggcaccggcgtgggcctgcaggacctggccgtggccagcgtggccgccaggctggccagggagcagggcctggtgacccccgtggccctg

SEQ ID NO: 61 - DNA, 966 bp, Halocynthiibacter sp. PAMC 20958
atgatcatcgtgcccgagagggagatcgccgacctgatgaccagggaggtggccttcaacgccgtggagggcgtgttcgccgccatggccgcccaggacgcctacaacttccccgtggtgagggaggccatcggctacgaggacgccctgtacggcttcaagggcggcttcgacaaggccggcatgaccctgggcctgaaggccggcggctactggccccacaacctggacaagcaccagctgatcaaccaccagagcaccatcttcctgttcgaccccgacaccggcagggtgaccgccatggtgggcggcaacctgctgaccgccctgaggaccgccgccgccagcagcgtgagcatcaagcacctggccaggaaggacagcaaggtgatcggcatgatcggcgccggccaccaggccaccttccagctgagggccgccctggagcagagggagttcgagaaggtgatcggctggaactaccaccccgagatgctgcccaacctggagaaggtggccaacgaggccggcctgcccttcgaggccgtggagctggaccagctgggccacgacgccgacgtgatcatcagcatcaccagcgccttcgcccccagcctgctggccaagcacgtgagcgccggcacccacatcgcctgcatgggcaccgacaccaagggcaagcaggaggtggagagcgccctgctggccagggccaccgtgttcaccgacgaggtggcccagagcatcagcatcggcgaggcccagcacgccgtggccgagggcctgatcaaggagagcgacgtgaaccagatcggcgccgtgatcaacggcacccaccccggcagggtggccgccgacgagatcaccctgttcgacggcaccggcgtgggcctgcaggacctggccgtggccgccagcgtggtggccctggccgtgaagaagggcgtggccatcgacgtggacttc

SEQ ID NO: 62 - DNA, 963 bp, Leisingera sp. ANG-S3; identical to SEQ ID NO: 24

SEQ ID NO: 63 - DNA, 960 bp, Paracoccus saliphilus DSM 18447
atgtgggtggtgcccgagaaggagatcgccggcctgatgacccccgaggccgccttcgacgccgtggaggccgtgttcgccgccatggccagcggcgaggccaacaacttccccgtggtgagggaggccatcggccacgaggacgccctgtacggcttcaagggcggcttcgacaagagcgccctgaacctgggcctgaaggccggcggctactggcccaacaaccagaagagggacctgatcaaccaccagagcaccgtgttcctgttcgaccccgacaccggcagggtgagcgccgccgtgggcggcaacctgctgaccgccctgaggaccgccgccgccagcgccgtgagcatcaagcacctggcccccgagggcgccaaggtgctgggcatgatcggcgccggccaccagagcgccttccagatgaaggccgccgccagggtgggcaacttcgagagggtgatcggctggaacccccaccccgagatgctgaccaggctggccgacaccgccgccgagctgggcctgcccttcgaggccgtggagctgcccaggctgggcgccgaggccgacgtgatcatcagcatcaccagcgccttcgagcccctgctgatggacgcccacgtgaagggcaggacccacatcgccgccatgggcaccgacaccaagggcaagcaggagctggaccccgccctggtggccagggccaggctgttcaccgacgagatcgcccagagcctgagcatcggcgagttccagcacgccagcgccgccggcagcatcagcgacggcgacgtgaccgccatcggccaggtgatcaccggcaaccacgagggcaggggcgacgccgagatcaccatcttcgacggcaccggcgtgggcctgcaggacctggccgtggccggcgccgtggtggacctggccaggcagcagggcaaggccgtggaggtggagatc

SEQ ID NO: 64 - DNA, 963 bp, Rhodovulum sulfidophilum DSM 1374
atgttcatcgtgcccgagaaggagatcgccggcctggtgagcgccgaccagtgcttcgaggccgtggaggccgtgttcgccgccatggccaggggcgacgcctacaacttccccgtgatcagggaggccatcggccacgccgaggccctgtacggcttcaagagcggcttcgacagggccggcgccgtgctgggcctgaagagcggcggctactggcccggcaacgccgccaagggcctgaccaaccaccagagcaccgtggtgctgttcgaccccgacagcggcaggcccgccgccctggtgggcggcaacctgctgaccgccctgaggaccgccgccgccagcgccgtgagcatcaggtacctggccaggagcgacgccagggtgctgggcgtgctgggcgccggccaccagagcgccttccagctgagggccgccgtggcccagaggaggttcgagaagatcgtgggctggaactaccaccccgagatgctgcccaggctggccgagaccgccgccgagctgggcctgcccttcgaggccgtgagcctggaggacttcggcgcccaggccgacgtgatcgtgaccatcagcagcagcttcagcgcccagctgatggacgcccacgtgaggcccggcacccacctggcctgcatgggcaccgacaccaccggcaagcaggagatcgaccccgccatcttcgtgagggccagggtgttcgccgacgagatcgcccagagcgtggagatcggcgaggcccagcacgccgtggccgccggcctgatcgccgccgaggacatcgtggagatcggcgccgtgatcaacggcaccgcccccggcaggcagagcgacgacgagatcaccgtgttcgacggcaccggcgtgggcctgcaggacctggccgtggccgccagggccgtggccgccgccagggccaggggcgtggccgtggaggtggacctg

SEQ ID NO: 65 - DNA, 963 bp, Litoreibacter ascidiaceicola DSM 100566
atgttcatcgtgcccgagagggagatcgccgacctgatgaccagggacgccgccttcgacgccgtggagagcgtgttcgccgccatggccagcaaggacgcctacaacttccccgtgatcagggaggccatcggccacgaggacgccctgtacggcttcaagggcggcttcgacaaggccggcatgaccctgggcctgaaggccggcggctactggcccaacaacctggagaagcacggccacatcaaccaccagagcaccatcttcctgttcaaccccgacaccggcatggtgagcgccatggtgggcggcaacctgctgaccgccctgaggaccgccgccgccagcagcgtgagcatcaagcacctggccaggaaggacgccaaggtgatgggcatggtgggcgccggccaccaggccaccttccagctgagggccgccctggagcagaggcagttcgagaaggtgatcggctggaactaccaccccgagatgctgcccaacatcgagaagatcgccatcgaggccggcctgcccttcgaggccgtggagctggacggcatgagggaggccgacgtggtgatcagcatcaccagcaccttcgcccccaccatcatggccgaccacatcgcccccggcacccacatcgcctgcatgggcaccgacaccaagggcaagcaggaggtggaggccgccctgctggccagggccaccgtgttcaccgacgaggtggcccagagcgtgagcatcggcgaggcccagcacgccgtggcccagggcctgatcaaggagagcgacgtgcaccagctgggcgccgtgatcaacggcacccacaagggcaggaccagcgacgacgagatcaccctgttcgacggcaccggcgtgggcctgcaggacctggccgtggccgccagcgtggtggagctggccgtggccaagggcgtggccatcgaggtggacttc

SEQ ID NO: 66 - DNA, 987 bp, Roseovarius marisflavi DSM 29327
atgagcgccaacaccgacgacggcctgctgatcgtgagcgaggagatctgcgagaaggtgatcaggaggcccgacgccttcagcgccgtggaggccgtgttcggcgccatggccaggggcgacgcctacaacttccccgtggtgagggaggccatcggccacgccgacgccctgtacggcttcaagagcggcttcgacagggccggcatggtgctgggcgtgaaggccggcggctactggcccggcaacatggccaagggcctgaccaaccaccagagcaccgtgtgcctgttcgaccccgacaccggcaggctgaccgccctggtgggcggcaactacctgaccgccctgaggaccgccgccagcagcgccgtgagcatcgcccacctggccaggaaggacgccaaggtgctgggcatggtgggcgccggccaccagagcaccttccagctgagggccgccgtggagcagagggacttcgagagggtggtggcctggaacccccaccccgacatgctgcccaggctggccgccgtggccgaggagctgggcctggccttcgaggccgtgacccccgaggagctgggcgcccaggccgacgtgatcatcaccatcaccagcgccttcgagcccctgatcatggccgactggatcaagcccggcacccacatcgcctgcatgggcaccgacaccaagggcaagcaggaggtggaccccgccctgttcaagagcgccaccgtgttcgccgacgagatcgcccagagcatcaccatcggcgaggcccagcacgccgtggccagcggcctgatcggcgagggcaacctgaccgccatcggcgaggtgatcaacggcacccaccccggcaggagcagcgccgaggagatcaccctgttcgacggcaccggcgtgggcctgcaggacctggccgtggccagcgtggccgccaggctggccagggagcagggcctggtgacccccgtggccctg

SEQ ID NO: 67 - DNA, 963 bp, Rhodovulum sp. ES.010
atgatcatcgtgcccgagaaggagatcgccggcctggtgagcgccgaggacagcttcagcgccgtggaggccgtgttcgccgccatggccaggggcgacgcctacaacttccccgtgatcagggaggccatcggccacgccgacgccctgtacggcttcaagagcggcttcgacagggccggcctggtgctgggcctgaagagcggcggctactggcccggcaacgccgagaagggcctgaccaaccaccagagcaccgtggtgctgttcgacgccgacaccggccaggcccacgccctggtgggcggcaacctgctgaccgccctgaggaccgccgccgccagcgccgtgagcatcaagcacctggccagggacgacgccaaggtgctgggcatggtgggcgccggccaccagagcgccttccagatgagggccgccgccgcccagagggacttcgagagggtggtgggctggaactaccaccccgagatgctgcccaggctggccgagaccgccgaggagctgggcctgcccttcgaggccgtgagcctggaggagctgggcgcccaggccgacgtgatcgtgaccatcaccagcagcttcgaggcccagctgaaggacacccacgtgaggcccggcacccacctggcctgcatgggcaccgacaccaagggcaagcaggaggtggaccccgccatcctggccagggccagggtgttcaccgacgaggtggcccagagcatcaccctgggcgaggcccagcacgccgtggccgccggcctgatcggcgagggcgacatcacccagatcggcgccgtgatcgagggcaccgccgccggcaggcagagcgccgaggagatcaccctgttcgacggcaccggcgtgggcctgcaggacctggccgtggccgccaaggccgtggacctggcccaggagaagggcgccgccatcgacgtggccttc

SEQ ID NO: 68 - DNA, 963 bp, Ruegeria sp. P4
atgtacatcgtgcccgagagggccatcgccgacctgatgaccagggacgccgccttcgacgccgtggagaaggtgttcgccgccatggccgccggcgacgcctacaacttccccgtggtgagggaggccatcggccacgaggacgccctgtacggcttcaagggcggcttcgacagggccggcctgagcctgggcctgaaggccggcggctactggcccaacaacctggagaagaggggcctgatcaaccaccagagcaccgtgttcctgttcgaccccgacaccggcaaggtgagggccatggtgggcggcaacctgctgaccgccctgaggaccgccgccgccagcagcgtgagcatcaagcacctggccagggaggacgccaaggtgatcggcatgatcggcgccggccaccaggccaagttccagctgagggccgccctggagcagagggacttcgacaaggtgatcggctggaacctgcaccccgagatgctgcccaacctggaggaggtggccaccgaggccggcctgcccttcgaggccgtggagctggacggcctgaaggaggccgacgtgatcatcagcatcaccagcagcttcgacgccatcctgcaggccgaccaggtgagccccggcacccacatcgcctgcatgggcaccgacaccaagggcaagcaggaggtggacccccagctgctggtgagggccaccgtgttcaccgacgaggtggcccagagcaccagcatcggcgaggcccagcacgccgtggcccagggcctgatcgccgaggccgacgtggcccagctgggcgccgtgatcaacggcgcccaccccggcaggagcagcgccgagcagatcaccctgttcgacggcaccggcgtgggcctgcaggacctggccgtggccgccagcgtggtggagctggccgtgaagaagggcatcgccatcgaggtggacttc

SEQ ID NO: 69 - DNA, 963 bp, Jannaschia rubra CECT 5088
atgatcatcgtgcccgaggccgtgatcgccgacctgatcacccccgaggccagcttcaccgccgtggagagggtgttcgccagcatggccgccaggagcgcctacaacttccccgtgatcagggaggccatcggccacgccgacgccctgtacggcttcaagagcggcttcgacagggccgccctgaacctgggcctgaagagcggcggctactggcccggcaacgccgccaagggcctgaccaaccaccagagcaccgtgttcctgttcgacgccgacaccggcaagtgcagggccgtggtgggcggcaacctgctgaccgccctgaggaccgccgccgccgccgccgtgagcgtggcccacctggccaggcccgacgccaaggtgctgggcatcgtgggcgccggccaccaggccgccttccagctgagggccgtggccgcccagaggcccttcgagaagatcgtggcctggaacaggagccccgagaagctggagaccctgaggggcgtggccgacgagctgggcctgggcttcgagagcgtgagcatcgaggacctgggcggccaggccgacgtgatcgtgaccatcaccagcagccacgacgccatcctgcacggcgcccaggtgaagcccggcacccacgtggcctgcatgggcaccgacaccaagggcaagagggaggtggacaacgacctgatcgccgccgccaccctgttcaccgacgaggtggcccagagcaccaccatcggcgagtgccagcacgccatcgtggacctgaccatcaggcccgaggacatcaccgagctgggcgccgtgatcaacggcgaccacaagggcaggaccagcgccgaggagatcaccctgttcgacggcaccggcgtgggcctgcaggacctggccgtggccagcgccgtggtggagctggccatgagcaggggcgtggccaccgaggtggacttc

SEQ ID NO: 70 - DNA, 981 bp, Ruegeria atlantica CECT 4292
atgaccacccaggagggcctgctgatcgtgggcgaggacctgtgcgagcagctggtgggcaggcagcaggccttcgacgccgtgcagagcgtgttcggcgccatggccaacggcggcgccaggaacttccccgtggtgagggaggccctgggctacgccgacgccctgtacggcttcaagagcggcttcgacagggacggccaggtgctgggcgtgaagagcggcggctactggcccggcaacgccgagcagggcctgaccaaccaccagagcaccgtgttcctgttcgaccccgacaccggcaggctgagcgccctggtgggcggcaactacctgaccgccgtgaggaccgccgccagcagcgccgtgagcatcgcccacctgagcaggaaggacgccaaggtgctgggcatggtgggcgccggccaccagagcgccttccagctgagggccgccgccgagcagaggggcttcgagaaggtggtggcctggaacccccaccccgacatgctgcccaggctggccgccgtggccgaggagatcggcctggagttcgaggccgtgagccagcaggagctgggcgcccagagcgacgtgatcatcaccatcaccagcgccttcgagcccctgctgatgaaggactggatcaagcccggcacccacctggcctgcatgggcaccgacaccaagggcaagatggaggtggaccccgccctggtggccagcgccaccgtgttcaccgacgaggtggcccagagcgccaccatcggcgaggcccagcacgccatgggcagcggcaccctgaccgagacccagatcacccccatcggcgccgtgatcaacggcgaccaccccggcaggagcagcgtggacgagatcaccctgttcgacggcaccggcgtgggcctgcaggacctggccgtggccagcgtggccgccaggctggccgacgaggccggcctggcccagagggccaccctg

SEQ ID NO: 71 - DNA, 963 bp, Rhizobium sp. N324
atgatcatcgtgcccgagagggccatcgccgacctgatcggcagcgccgagtgcttcaccgccgtggagcaggtgttcgccgccatggccaggaagagcgcctacaacttccccgtggtgagggagagcatcggctacgccgacgccctgtacggcttcaagagcggcttcgacagggagagcctgagcctgggcctgaagagcggcggcttctggcccaagaacgccgagaagggcctgaccaaccaccagagcaccgtgttcctgttcgacgccgacaccggcaggtgcagggccgtggtgggcggcaacctgctgaccgccctgaggaccgccgccgccagcgccatcagcatcaagtacctggccagggaggacgccaagatcctgggcatcatcggcgccggccaccagagcaccttccagctgagggccgccgtgcagcagaggaacttcgagaaggtggtggcctggaactaccaccccgagatgctgaccaggctggaggacgtggccaaggaggtgggcctgcccttcgaggccgtggacctgcacaggctgggcgccgaggccgacgtgatcatcagcatcaccagcagcttcaggcccagcctgatggccagccaggtgaggcccggcacccacctggcctgcatgggcaccgacaccaagggcaagcaggaggtggacgccaagctggtggccgccagcagcctgttcaccgacgaggtggcccaggccatcaccatcggcgagtgccagcacgccatcgccgccggcctgatcgccgccgaggacatcctggagatcggcgccgtgatcaccggcgaggagaagggcaggaggagcgccgacgacatcaccctgttcgacggcaccggcgtgggcctgcaggacctggccgtggccagcgccgtggtggacctggccgtgagcaagggcgtggccatcgaggtggacttc

SEQ ID NO: 72 - DNA, 963 bp, Rhizobium sp. N941; identical to SEQ ID NO: 71

SEQ ID NO: 73 - DNA, 963 bp, Sinorhizobium americanum CFNEI 73
atgatcatcgtgcccgagaaccagatcgccggcctgatcacccccgccgactgcctggtggccgtggagggcgtgttcgccagcatggccaagaagagcgcctacaacttccccgtgatcagggaggccatcggccacgccgacgccctgtacggcttcaagagcggcttcgacagggacagcctggccctgggcctgaagagcggcggcttctggcccaacaacgtggagaagggcctggccaaccaccagagcaccgtgttcctgttcgacgccgacaacggcaggtgcagggccgtggtgggcggcaacctgctgaccgccctgaggaccgccgccgccagcgccgtgagcatcaagtacctggccaggaaggacgccaaggtgctgggcatgatcggcgccggccaccagagcacctaccagctgagggccgccgtggagcagaggcccttcgagaaggtgctggcctggaacctgcaccccgagatgctgagcaggctggaggaggtggccagggagctggagctgcccttcgagaccgtggacctggacaggctgggcgccgaggccgacgtgatcatcagcatcaccagcagcttcgcccccatcctgaaggccagccaggtgaggcccggcacccacctggcctgcatgggcaccgacaccaagggcaagcaggagatggaccccgagctgatcgccgccgccaccgtgttcaccgacgaggtggcccaggccgtgaccatcggcgagtgccagcacgccatcgacaagggcctgatcagcaagggcgacatcgtggagatcggcgccgtgatcaccggcaggcacaagggcaggagcagccccgaggagatcaccctgttcgacggcaccggcgtgggcctgcaggacctggccgtggccagcgccgccgtggagctggccctgagcaagggcaccgccatcgaggtggacttc

SEQ ID NO: 74 - DNA, 963 bp, Puniceibacterium sediminis DSM 29052
atgctgatcgtgcccgagagcaagatcgccgacctgatgacccccgaggccgccttcgacgccgtggaggccaccttcgccgccatggccaggaagagcgcctacaacttccccgtgatcagggaggccatcggccacgccgacgccctgtacggcttcaagagcggcttcgacagggagagcctggtgctgggcctgaagagcggcggctactggcccggcaacgccgagaagggcctgaccaaccaccagagcaccatcttcctgttcgacgccgacaccggcaagtgcagcgccatcgtgggcggcaacctgctgaccgccctgaggaccgccgccgccagcgccgtgagcatcaagcacctggccaggcaggacagcgaggtgctgggcatgatcggcgccggccaccagagcgtgttccagatgcaggccgccgtgaagcagaggaacttcaagaaggtgatcggctggaactaccaccccgagatgctgagcaggctggccgactgcgccgccgagctgggcctgcccttcgaggaggtgagcctggagaccctgggcagggacgccgacgtgatcatcagcatcaccagcagcttcgcccccaccctgctggacgcccacgtgacccccggcacccacatcgcctgcatgggcaccgacaccaagggcaagcaggaggtggaggccaccctgctgaagagggccaccgtgttcaccgacgagatcgcccagagcatcagcatcggcgaggcccagcacgccgtggccgccggcctgatcgcccagagcgacatcaccgagatcggcgccgtgatcaacggcacccaccccggcaggagcagcgccgacgagatcaccctgttcgacggcaccggcgtgggcctgcaggacctggccgtggccgccaaggtggtggagctggcccagcagaagggcgtggccctggacgtggacttc

SEQ ID NO: 75 - DNA, 963 bp, Hyphomicrobium sulfonivorans WDL6
atgatcatcatccccgagagggagatcgccggcctgatcagcgccgccgactgcttcgtggccgtggagagggtgttcgccagcatggccaggaggagcgcctacaacttccccgtggtgagggagagcatcggccacgccagcgccctgtacggcttcaagagcggcttcgacagggagaacctgagcctgggcctgaaggccggcggcttctggcccgacaacgccgagaagggcctgaccaaccaccagagcaccgtgttcctgttcgacgccgacaccggcaggtgcagggccatcgtgggcggcaacatgctgaccgccctgaggaccgccgccgccagcgccgtgagcatcaagtacctggccagggccgacgccaaggtgctgggcatgatcggcgccggccaccagagcaccttccagctggaggccgccctggaccagaagctgttcgagaaggtgctgggctggaacatcgagcccaacgccctgagcaggctggaggccgtggccctgaagaggaacatccccttcgagagggtgagcctggacaggctgggcgccgaggccgacgtgatcatcaccatcaccagcagcttcgcccccatcctgaagaccgtgcaggtgaggcccggcacccacctggcctgcatgggcaccgacaccaagggcaagcaggaggtggaggccagcctggtggccgccgccaccgtgttcaccgacgagatcggccagagcatcgccatcggcgaggcccagcacgccatcaacgagggcctgatggaggccgacgagatcgtggagttcggcaacgtggtgtgcggcaaccacaggggcaggaccagcgccgacgagatcaccctgtacgacggcaccggcgtgggcctgcaggacctggccgtggccagcgccgtggtggagctggccatcaccaggggcgtggccaccgagatggacctg

SEQ ID NO: 76 - DNA, 963 bp, Marivita geojedonensis DSM 29432
atgtacatcgtgcccgaggccatgatcgccgacctggtgagcagggaggccagcttcgaggccgtggagcaggtgttcgccgccatggccgccaaggacgcctacaacttccccgtggtgagggaggccatcggccacgaggacgccctgtacggcttcaagggcggcttcgacagggtgggcggcgccctgggcctgaaggccggcggctactggccccacaacctggagaagaggggcctgatcaaccaccagagcaccgtgttcctgttcgaccccgacaccggcaaggtgagggccatggtgggcggcaacctgctgaccgccctgaggaccgccgccgccagcagcgtgagcatcaagcacctggccagggccgacgccagggtgatgggcatggtgggcgccggccaccaggccaccttccagctgagggccgccctggagcagaggcccttcgagaaggtgatcggctggaactaccaccccgagatgctgcccaacatcgagaaggtggccaacgaggccggcgtgcccttcgaggccgtggacctgcccggcatggccgaggccgacgtgatcatcagcatcaccagcgccttcgcccccagcctgatggccgaccacgtgagccccggcacccacctggcctgcatgggcaccgacaccaagggcaagcaggaggtggagagcgccctgctggccagggccaaggtgttcaccgacgaggtggcccagagcgtgagcatcggcgaggcccagcacgccgtggccgccggcctgatcgccgagagcgacgtgaccgagatcggcgccgtgatcaacggcacccaccccggcaggaccagcggcgacgacatcaccctgttcgacggcaccggcgtgggcctgcaggacctggccgtggccagcaaggtggtggacctggccatcgagaggggcgtggccatcgaggtggacttc

SEQ ID NO: 77 - DNA, 996 bp, Marinobacterium mangrovicola DSM 27697
atgaccacccccgccagcggcgccggcaaccccgtgagcatcgtgagcgaggccgtgtgccagcagatcgtgggcaggcccgaggccttcaaggccgtggagaacgtgttcgccgccatggccaggggcgacgcctacaacttccccgtggtgagggaggccatcggccacgccgacgccctgtacggcttcaagagcggcttcgacagggccggcatggccctgggcgtgaagagcggcggctactggcccggcaacgtgcagaaggacctgaccaaccaccagagcaccgtgatcctgttcgaccccgacaccggccagctgaagagcctggtgggcggcaactacctgaccgccgtgaggaccgccgccgccagcgccgtgagcatcgcccacctggccaggagggacgccaaggtgctgggcatggtgggcgccggccaccagagcaccttccagctgagggccgccctggagcagagggacttcgagaaggtggtggcctggaacccccaccccgagcacctgcccaggctggccgccgtgtgcgaggagctgagggtgcccttcgaggccgtgacccagcaggagctgggcgcccaggccgacgtgatcatcaccatcaccagcgccttcgagcccctgctgctgaaggagtggatcaagcccggcacccacatcgcctgcatgggcaccgacaccaagggcaagcaggaggtggaccccgccctgctggccgccgccagcgtgttcaccgacgaggtggcccagagcatcagcatcggcgaggcccagcacgccgtggccagcggcctgatcgccgaggccgacatcacccccatcggcaaggtgatcaacggcacccacgtgggcaggagggacgaccaggagatcaccctgttcgacggcaccggcgtgggcctgcaggacctggccgtggccagcgccgccgccgagctggccgagcagcagggcctgagccagaagatcatcctg

SEQ ID NO: 78 - DNA, 963 bp, Stappia aggregata IAM 12614
atgatcatcgtgcccgagaaggagatcgccggcctgatcggcaggcaggagagcttcgacgccgtggagagcgtgttcgccgccatggccagcggcgccgcctgcaacttccccgtgatcagggaggccatcggccacgccgacgccctgtacggcttcaagagcggcttcgacaggagcagcctggccctgggcctgaagagcggcggctactggcccggcaacatggccaagggcctgaccaaccaccagagcaccgtgttcctgttcgacgccgacaccggcaaggccaaggccgtggtgggcggcaacctgctgaccgccctgaggaccgccgccgccagcgccgtgagcatcaagcacctggccaggaaggacgccaaggtgctgggcatgatcggcgccggccaccagagcgccttccagatgagggccgccgccgagcagaggagcttcgagaaggtgctgggctggaacctgcaccccgagatgctggtgaggctggaggccaccgccaacgagctgggcctgccctacgagagcgtggacctggccaggctgggcgccgaggccgacgtgatcatcagcatcaccagcagcttcgaccccatcctgatggaggagcacgtgacccccggcacccacatcgcctgcatgggcaccgacaccaagggcaagcaggaggtggacaccgccctggtggccaaggccaagctgttcaccgacgaggtggcccagagcgccaccatcggcgagtgccagcacgccgtggccagcggcatcgtgagcgaggacaacatcatcgagatcggcgccgtgatcaacggcaaccaccccggcaggatcagccagagcgacatcaccctgttcgacggcaccggcgtgggcctgcaggacctggccgtggccagcgccgccgtggacctggccatccagaagggcgtggccatcgaggtggacttc

SEQ ID NO: 79 - DNA, 993 bp, Sagittula stellata E-37
atgaaggacaccccccagcagggcgacggcgtgctgatcgtgggcgaggaggcctgcagggccctggtgggcagggccgaggccttcgccgccgtggaggccgtgttcgccgccatggccagcggcgaggccaggaacttccccgtggtgagggaggccatcggccacgccgacgccctgtacggcttcaagagcggcttcgacagggccggcatggccctgggcgtgaaggccggcggctactggcccggcaacgccggcaggggcctgaccaaccaccagagcaccgtgtgcctgttcgaccccgacaccggcaggctgagcgccctggtgggcggcaactacctgaccgccgtgaggaccgccgccagcagcgccgtgagcatcgcccacctggccaggagggacgccaaggtgctgggcatggtgggcgccggccaccagagcgccttccagctgagggccgccgccgagcagagggccttcgagaaggtggtggcctggaacccccaccccgagatgctgccccagctggccgaggtggccgccagcctgggcctgcccttcgaggccgtgacccccgaggagctgggcgcccaggccgacgtggtgatcaccatcaccagcgccttcgagcccctgctgatgagggactggatcaggcccggcacccacgtggcctgcatgggcaccgacaccaagggcaagatggaggtggacgccgccctgctggccgccgccaccgtgttcaccgacgaggtggcccagagcgtgagcctgggcgaggcccagcacgccgtggccggcggcctgctgagcgagggcgacatcacccccatcggcgccgtgatcaacggcacccaccccggcaggaccagcgacgacgagatcaccctgttcgacggcaccggcgtgggcctgcaggacctggccgtggccagcgtggccgccaggctggccgaggcccagggcgtggccgccagggtggtgctg

SEQ ID NO: 80 - DNA, 963 bp, Roseobacter sp. CCS2
atgatcatcgtgcccgagaaggagatggccggcctgctgaacagggccgacgccttcaccgccgtggagaacgtgttcgccagcatgagcaagggcgacgcctacaacttccccgtgatcagggaggccatcagccacgaggacgccctgtacggcttcaagggcggcttcgacaaggccggcatggccctgggcctgaaggccggcggctactggcccaacaacctggagaagcacggccacatcaaccaccagagcaccgtgttcctgttcgaccccgacaccggcatggtgaaggccatggtgggcggcaacctgctgaccgccctgaggaccgccgccgccagcagcgtgagcatcaagcacctggccaggaaggacgccagggtgatgggcatggtgggcgccggccaccaggccaccttccagctgagggccgccctggagcagagggagttcgagaaggtgatcggctggaactaccaccccgagatgctgcccaacatcgagaaggtggccgacgaggccggcgtgcccttcgaggccgtgcccctggagggcatggtggaggccgacgtggtgatcagcatcaccagcaccttcgcccccaccatcatggccgaccacatcagccccggcacccacatcgcctgcatgggcaccgacaccaagggcaagcaggagatcgaggccgccctgctggcccagaccaccgtgttcaccgacgaggtggcccagagcatcagcatcggcgaggcccagcacgccatcgccgagggcatgatccagcagagcgacgtgaacgagctgggcgccgtgatcaacggcacccaccccggcaggaccagcgacgacgagatcaccctgttcgacggcaccggcgtgggcctgcaggacctggccgtggccgccagcatcgtggacgtggccgtggagaagggcatcgccaccatcgtggagttc

SEQ ID NO: 81 - DNA, 1014 bp, Roseobacter sp. AzwK-3b
atgaacgacctgagcgcccaggcccccaaggccgcccaggccggcaacaccgtgaccatcgtgcccgaggccgagatcgccggcctgatgacccccgaggccgccttcgacgccgtggaggccaccttcgccgccatggccaggggcgacgcctacaacttccccgtgatcagggaggccatcggccacgccgacgccctgtacggcttcaagagcggcttcgacagggagagcctggccctgggcctgaagagcggcggctactggcccggcaacgaggccaggggcctgaccaaccaccagagcaccgtgatcctgttcgacgccgacaccggcaggcccagcgccctggtgggcggcaacctgctgaccgccctgaggaccgccgccgccagcgccgtgagcatcaggtacctggccaggcaggacgccaaggtgctgggcatgatcggcgccggccaccagagcgccttccagatgagggccgccgtgcagcagaggagcttcgagaaggtggtgggctggaactaccaccccgagatgctgagcaggctggccgacaccgccgccgagctgggcctgagcttcgaggccgtgagcctggaggagctgggcgcccaggccgacgtgatcgtgaccatcaccagcagcttcgcccccagcctgctggacgcccacgtgaggcccggcacccacctggcctgcatgggcaccgacaccaacggcaagcaggaggtggaggccggcctgctggccagggccagggtgttcaccgacgaggtggcccagagcgtgaccctgggcgaggcccagcacgccgtggccgagggcctgatcagcgccgacgacatcacccagctgggcgccgtgatcaacggcatccaccccggcaggagcagcgaccaggagatcaccctgttcgacggcaccggcgtgggcctgcaggacctggccgtggccgccgccgtggtgaggctggccagggagcagggcgtggccagcgaggtggtgctg

SEQ ID NO: 82 - DNA, 963 bp, Rhodobacteraceae bacterium KLH11 scf_1108856220443 genomic scaffold
atgatcatcgtgcccgagaaggagatcggcgccctgctgggcaggaaggagagctacgaggccgtggagcaggtgttcgccgccatggccagcggcgacgcctacaacttccccgtggtgagggaggccatcggccacgaggacgccctgtacggcttcaagggcggcttcgacaaggccggccaggtgctgggcctgaaggccggcggctactggccccacaacctggagaagaggggcctgatcaaccaccagagcaccgtgttcctgttcgaccccgacaccggcatgcccaccgccatggtgggcggcaacctgctgaccgccctgaggaccgccgccgccagcagcgtgagcatcaaccacctggccaggaaggacgccagggtgatcggcatggtgggcgccggccaccaggccaccttccagctgagggccgccctggagcagagggagttcgagaaggtgatcggctggaacctgcaccccgagatgctgcccaacatcgagaaggtggccgccgaggccggcctgcccttcgaggccgtggagctgcccggcatgacccaggccgacgtgatcgtgaccatcaccagcagcttcgcccccaccctgctgagcgaccacgtggccgacggcacccacgtggcctgcatgggcaccgacaccatcggcaagcaggaggtgggcaccgacctgatcaccagggccagcgtgttcaccgacgaggtggcccaggccatcaccctgggcgagagccagcacgccgtgaaggccggcaccaaggccgaggccgacatccaccagatcggcgccgtgatcaacggcacccacaccggcaggagcagcgacgacgaggtgaccctgttcgacggcaccggcgtgggcctgcaggacctggccgtggccagcgccgtggtggacctggccatcaagcagggcatcgccatcaaggtggacatc

SEQ ID NO: 83 - DNA, 963 bp, Rhodobacteraceae bacterium KLH11 scf_1108856220445 genomic scaffold; identical to SEQ ID NO: 82

SEQ ID NO: 84 - DNA, 963 bp, Silicibacter sp. TrichCH4B genomic scaffold scf_1113354613205
atgtacatcgtgcccgagagggccatcgccgacctgatgaccagggacgccgccttcgacgccgtggagaaggtgttcgccgccatggccgccggcgacgcctacaacttccccgtggtgagggaggccatcggccacgaggacgccctgtacggcttcaagggcggcttcgacagggccggcctgagcctgggcctgaaggccggcggctactggcccaacaacctggagaagaggggcctgatcaaccaccagagcaccgtgttcctgttcgaccccgacaccggcaaggtgagggccatggtgggcggcaacctgctgaccgccctgaggaccgccgccgccagcagcgtgagcatcaagcacctggccagggaggacgccaaggtgatcggcatgatcggcgccggccaccaggccaagttccagctgagggccgccctggagcagagggacttcgacaaggtgatcggctggaacctgcaccccgagatgctgagcaacctggaggaggtggccaccgaggccggcctgcccttcgaggccgtggagctggacggcctgaaggaggccgacgtgatcatcagcatcaccagcagcttcgacgccatcctgaaggccgaccaggtgagccccggcacccacatcgcctgcatgggcaccgacaccaagggcaagcaggaggtggacccccagctgctggtgagggccaccgtgttcaccgacgaggtggcccagagcatcagcatcggcgaggcccagcacgccgtggcccagggcctgatcgccgaggccgacgtggcccagctgggcgccgtgatcaacggcgcccaccccggcaggagcagcgccgagcagatcaccctgttcgacggcaccggcgtgggcctgcaggacctggccgtggccgccagcgtggtggagctggccgtgaagaagggcatcgccatcgaggtggacttc

SEQ ID NO: 85 - DNA, 963 bp, Pelagibaca bermudensis HTCC2601 1100011001308
atgctgatcgtgcacgagagggagatcgccgccctgatgaccagggacgccgccttcagcgccgtggagaaggtgttcgccgccatggccgacgccaaggcctacaacttccccgtggtgagggaggccatcggccacgaggacgccctgtacggcttcaagggcggcttcgacagggccggcctgaccctgggcctgaaggccggcggctactggccccacaacctggagaagaggggcgagatcaaccaccagagcaccgtgttcctgttcgaccccgacaccggcaaggccaaggccatggtgggcggcaacctgctgaccgccctgaggaccgccgccgccagcagcgtgagcatcaggcacctggccagggacgacgccaaggtgctgggcatgatcggcgccggccaccaggccaccttccagctgagggccgccctggagcagagggccttcgagaaggtgatcggctggaacctgcaccccgagatgctgcccaacctggagaaggtggcccaggaggccggcgtgcccttcgaggccgtggagctgcccggcatgaccgaggccgacgtgatcatcaccatcaccagcgccttcagccccagcctgatggccgagcacgtgagccccggcacccacatcgcctgcatgggcaccgacaccaagggcaagcaggaggtggaggccgccctgctgagcagggccaccgtgttcaccgacgaggtggcccagagcgtgagcatcggcgaggcccagcacgccgtggccgagggcgccctgaaggccgaggacatcgcccagctgggcgccgtgatcaacggcagccaccccggcaggcagagcgccgaggagatcaccctgttcgacggcaccggcgtgggcctgcaggacctggccgtggccgccgccgtggtggacctggccgtggagaagggcgtggccaccgaggtggacttc

SEQ ID NO: 86 - DNA, 960 bp, Paracoccus sp. J39 ICCT; identical to SEQ ID NO: 46

SEQ ID NO: 87 - DNA, 960 bp, Paracoccus sp. J55; identical to SEQ ID NO: 46

SEQ ID NO: 88 - DNA, 981 bp, Rhodovibrio salinarum DSM 9154
atgaccgacaaccaccaggtggtggtggtgcccgaggacctgtgcgaggccctggtgagcagggccgacgccttccaggccgtggagcaggtgttcgccgccatggccagcggcgacgccaggaacttccccgtggtgagggaggccaccggccacgccgaggccctgttcggcttcaagagcggcttcgacaaggccggcatggccctgggcctgaaggccggcggcttctggcccggcaacgccgacaagggcctgaccaaccaccagagcaccgtgttcctgttcgaccccgacaccggcaggctgcaggccctggtggccggcaactacctgaccgccgtgaggaccgccgccagcagcagcgtgagcatcaggcacctggccaggcccgacgccaaggtgctgggcatggtgggcgccggccaccaggcccagttccagctgagggccgccgccgagcagagggccttcgagaaggtggtggcctggaacccccaccccgacatgctgagcaagctggaggccgtggccagggagatcggcctgcccttcgaggccgtgagccagcacgagctgggcgcccaggcccacgtgatcatcaccatcaccagcgccttcgagcccctgctgatgagggactggatcaagcccggcacccacatcgcctgcatgggcaccgacaccaagggcaagcaggaggtggaccccgagctggtggccggcgccagggtgttcaccgacgaggtggcccagagcgtgcagctgggcgagacccagcacgccgtggcccagggcctgctggccgagagcgacatcacccccatcggcgaggtgatcaacaagacccaccccggcaggcagagcgacgacgagatcaccctgttcgacggcaccggcgtgggcctgcaggacctggccgtggccgccaccgccgccaagctggcccagcagcagggcaaggccgagaccgtgaggctg

SEQ ID NO: 89 - DNA, 1005 bp, Colwellia piezophila ATCC BAA-637
atgagcaacagccagcagaacaacctgcccaagaacaagggcgtgagcgtggtgagcgaggaggtgtgccagcaggtgatgggcagggagaacgccttcagcgccgtggagaacgtgttcagcgccatggccaagaacaccgcctacaacttccccgtgatcagggaggccatcggccacgaggacgccctgtacggcttcaagagcggcttcgacagggacggcatggtgctgggcctgaagagcggcggctactggcccggcaacatggccaagggcctgaccaaccaccagagcaccgtgatcctgttcgaccccgacaccggcaagctgaagagcctggtgggcggcaactacctgaccgccgtgaggaccgccgccagcagcgccgtgagcatcgcctacctggccaggaaggacagcaaggtgctgggcatgatcggcgccggccaccagagcagcttccagctgagggccgccgtggagcagagggacttcgagaaggtggtgtgctggaacttccaccccgagcagatccccaacctggccgccgtggccgaggagctgggcctgcccttcgagagcgtgaccagggaggagctgtgcgcccaggccgacgtgatcatcaccatcaccagcgccttcgaggccctgatcgacaagaactggatcaagcccggcacccacatcgcctgcatgggcaccgacaccaagggcaagcaggaggtggacgccaagctgctggccgtggccagcgtgttcaccgacgagctggcccagagcatcaccatcggcgaggcccagcacgccatcgcccagaagctgatccagcagagcgacatcgtgcccatcggcgaggtgatcaacggcaccaagcccggcaggaccagcgacgagcagatcaccctgttcgacggcaccggcgtgggcctgcaggacctggccgtggccagcgtggccgccgagctggccgaggagaagggcctggccacctacttccagctg

SEQ ID NO: 90 - DNA, 963 bp, Rubellimicrobium mesophilum DSM 19309 (scaffold version)
atgatcgtggtgcccgagaggatcatcgccggcctgatgaccagggccgacgccttcgccgccatcgaggccgtgttcgccgccatggccaggggcgaggccaggaacttccccgtggtgagggaggccatcggccacgccgacgccctgtacggcttcaagagcggcttcgacagggcccacctggacctgggcctgaagagcggcggctactggcccggcaacgccgccaagggcctgaccaaccaccagagcaccgtggtgctgttcgacgccgacaccggcaggtgcagggccctggtgggcggcaacctgctgaccgccctgaggaccgccgccgccgccgccgtgagcgtggcccacctggccaggaaggacagcagggtgctgggcatcgtgggcgccggccaccaggccgccttccagctgagggccgtggccgagcagaggcccttcgagagggtggtggcctggaacaggagccccgagaagctgaagggcctggcctgcgccgccgaggagatgggcctgcccttcgagagcgtgagcctggacaggctgggcgccgaggccgacgtgatcgtgaccatcaccagcagcttcgacgccatcctgggcgacgcccaggtgaggcccggcacccacctggcctgcatgggcaccgacaccagggacaagaaggaggtggaccccaccctggtggccagggccagcgtgttcaccgacgaggtggcccaggccgtgaccatcggcgagtgccagcacgccgtggccctgggcctgaagggcgaggccgacatcgtgcccctgggcgccgtgatcaacggcgaccaccccggcagggccagcgaggaggaggtgaccctgttcgacggcaccggcgtgggcctgcaggacctggccgtggccagcagggtggtggacctggccgtgcagaagggcctggccacccaggtggagttc

SEQ ID NO: 91 - DNA, 963 bp, Maritimibacter sp. HL-12
atgctgatcgtgcccgagagggacatcgccaagctgctgaccaggaaggccgccttcgaggccgtggagaaggtgttcgccagcatggccaagggcgccgccaggaacttccccgtggtgagggaggccatcggccacgaggacgccctgttcggcttcaagggcggcttcgacagggccggcatgaccctgggcctgaaggccggcggctactggccccacaacatggccgcccacggcgtgatcaaccaccagagcaccgtggtgctgttcgaccccgacaccggcaggctgagggccatggtgggcggcaacctgctgaccgccctgaggaccgccgccgccagcgccgtgagcatcaagcacctggccaggcccgacgccgccgtgctgggcatgatcggcgccggccaccaggccgccttccagctgagggccgccctggagcagagggacctggtgaaggtgatcggctggaacaggaaccccgagaagctggccggcctggaggccgtggccgccgaggccggcgtggccttcgagaccgtggacctggacggcatgggcgaggccgacgtgatcatcaccatcaccagcagcttcgcccccatcctggagcacggccacgtgagccccggcacccacgtggcctgcatgggcaccgacaccaggggcaagcaggaggtggaccccggcctgctggccagggccagcgtgttcaccgaccaggtggcccagagcgtgagcatcggcgaggcccagcacgccgtgggccagggcctgatcagcgaggccgagatcggcgagctgggcgccgtgatcaacaagaccctgcccggcaggaccaccgacgaccagatcaccctgttcgacggcaccggcgtgggcctgcaggacctggccgtggccgccagcgtggtggagatggccgtggaccagggcctggccatcgaggtggccctg

SEQ ID NO: 92 - DNA, 963 bp, Methylobacterium sp. L2-4; identical to SEQ ID NO: 39

SEQ ID NO: 93 - DNA, 963 bp, Ensifer fredii GR64
atgatcatcgtgcccgagaaccagatcgccggcctgatgacccccgccgactgcctggtggccgtggaggaggtgttcgccagcatggccaagaggagcgcctacaacttccccgtgatcagggaggccatcggctacgccgacgccctgtacggcttcaagagcggcttcgacagggccaacctggccctgggcctgaagagcggcggcttctggcccaacaacgtgcagaagggcctggccaaccaccagagcagcgtgttcctgttcgacgccgacaccggcaagtgcagggccgtggtgggcggcaacctgctgaccgccctgaggaccgccgccgccagcgccatcagcatcaagcacctggccaggaaggacgccaaggtgctgggcatgatcggcgccggccaccagagcaccttccagctgagggccgccgtggagcagtgcagcttcgagaagatcctggcctggaacttccaccccgagatgctgagcaggctggaggaggtggccagggagctggagctgcccttcgaggccgtggagctggacaggctgggcgccgagagcgacgtgatcatcagcatcaccagcagcttcgcccccatcctgaaggccagccaggtgaggcccggcacccacctggcctgcatgggcaccgacaccaagggcaagcaggagatggaggccggcctggtggccgccgccaccgtgttcaccgacgagatcgcccaggccgtgaccatcggcgagtgccagcacgccatcgagaggaagctgctgagcagggccgacatcaccgagctgggcgccgtgatcaccggcaggcaccccggcaggagcagccccgacgagatcaccctgttcgacggcaccggcgtgggcctgcaggacctggccgtggccagcgccgccgtggcccacgccgtgagcaggggcaccgccatcgaggtggacttc

SEQ ID NO: 94 - DNA, 963 bp, Ponticoccus litoralis DSM 18986
atgctgatcgtgcccgagagggagatcgccgacctgatgaccagggaggccgccttcgccgccgtggagagcgtgttcgccgccatggccagcggcgacgcctacaacttccccgtggtgagggaggccatcggccacgaggacgccctgtacggcttcaagggcggcttcgacagggccggcctgaccctgggcctgaaggccggcggctactggccccacaacctggagaagaggaaggagatcaaccaccagagcaccgtgttcctgttcgaccccgacaccggcaaggccagggccatggtgggcggcaacctgctgaccgccctgaggaccgccgccgccagcagcgtgagcatcaggcacctggccagggaggaggccaaggtgctgggcatgatcggcgccggccaccaggccaccttccagctgagggccgccctggagcagaggcccttcgagaaggtggtggcctggaacctgcaccccgagatgctgcccaacctggagaaggtggcccaggaggccgacgtgcccttcgaggccgtggagctgcccggcatggcccaggccgacgtgatcatcaccatcaccagcgccttcgcccccagcctgctggccgagcacgtgagccccggcacccacatcgcctgcatgggcaccgacaccaagggcaagcaggaggtggaggccgccctgctgacccacgccaccgtgttcaccgacgaggtggcccagagcgtgagcatcggcgaggcccagcacgccgtggccgacggcaccctgaagcccggcgacatcgcccagctgggcgccgtgatcaacggcacccaccccggcaggcagagcgccgaggagatcaccctgttcgacggcaccggcgtgggcctgcaggacctggccgtggccgccagcgtggtggacctggccgtggagaagggcgtggccatcgaggtggacttc

SEQ ID NO: 95 - DNA, 963 bp, Rhizobium sp. OK494
atgatcatcgtgcccgagaccgagatcgccggcctggtgacccccgccgactgcttcagggccgtggagggcgtgttcgccagcatggccgacaagagcgcccacaacttccccgtggtgagggaggccatcggccacgccgacgccctgtacggcttcaagagcggcttcgacaggaagggcctggccctgggcctgaaggccggcggcttctggcccaacaacgtgcacaagggcctgaccaaccaccagagcaccgtgttcctgttcgaccccgacaccggcaagtgcagggccgtggtgggcggcaacctgctgaccgccctgaggaccgccgccgccagcgccatcagcatcaagtacctggccaggaaggacgccaaggtgctgggcatgatcggcgccggccaccaggccaccttccagctgagggccgccctggcccagaggcccttcgagaggatcgtgggctggaacctgcaccccgacatgctgagcaggctggaggaggtggccaaggaggagggcctgcccttcgaggccgtggacctggacaggctgggcgccgaggccgacgtgatcatcagcatcaccagcagcttcgcccccatgctgaaggccagccaggtgagggccggcacccacctggcctgcatgggcaccgacaccaagggcaagcaggaggtggaggccgagatcctggccgccgccgccgtgttcaccgacgaggtggcccaggccgtgaccatcggcgagagccagcacgccatcgagaggggcctgatcagggaggaggccatcgtggagatcggcgccgtgatcaacggcacccaccccggcaggaccagcgccgaccagatcaccctgttcgacggcaccggcgtgggcctgcaggacctggccgtggccagcgccgccgtggagctggccctggccaagggcgtggccatcgaggtggacttc

SEQ ID NO: 96 - DNA, 963 bp, Planktotalea frisia DSM 23709
atgtggatcgtgcccgagagggagatcgccgacctgctgaccagggacgccagcttcgacgccgtggagaaggtgttcgccgccatggccgccggcgacgcctacaacttccccgtgatcagggaggccatcggccacgaggacgccctgtacggcttcaagggcggcttcgacggcgtgggcggcaccctgggcctgaaggccggcggctactggccccacaacctggagaagaggaacctgatcaaccaccagagcaccgtgttcctgttcgaccccgacaccggcaaggtggccgccatggtgggcggcaactacctgaccgccctgaggaccgccgccgccagcagcgtgagcatcaagcacctggccaggaccgacgccaaggtgatgggcatggtgggcgccggccaccaggccaccttccagctgagggccgccctggagcagagggagttcgagaaggtgatcggctggaactaccaccccgagatgctgcccaacatcgagaaggtggccaacgaggccggcgtgcccttcgaggccgtggagctggagggcctgggcgaggccgacgtggtgatcagcatcaccagcaccttcgcccccaccatcatggccgaccacatcagcgccggcacccacatcgcctgcatgggcaccgacaccaagggcaagcaggaggtggaggccgccctgctggccagggccaccgtgttcaccgacgaggtggcccagagcatcagcatcggcgaggcccagcacgccatcgaggccggcctgatccaggaggccgacgtgcaccagatcggcgccgtgatcaacgccacccacaagggcaggaccagcgacgacgagatcaccctgttcgacggcaccggcgtgggcctgcaggacctggccgtgagcgccgccatcgtgaggatggccatcgagcagggcgtggccatcgaggtggacttc

SEQ ID NO: 97 - DNA, 960 bp, Paracoccus denitrificans DSM 415; identical to SEQ ID NO: 4

SEQ ID NO: 98 - DNA, 960 bp, Paracoccus halophilus CGMCC 1.6117
atgtgggtggtgcccgagaaggagatcgccggcctgatgacccccgaggccgccttcgacgccatcgagagcgtgttcgccagcatggccaggaggaaggcctacaacttccccgtggtgagggaggccatcggctacgaggacgccctgtacggcttcaagggcggcttcgacgccgccgccctgaccctgggcctgaaggccggcggctactggcccaacaaccagaagcacggcatcatcaaccaccagagcaccgtgttcctgttcgaccccgacaccggcagggtggccgccgccgtgggcggcaacctgctgaccgccctgaggaccgccgccgccagcgccgtgagcatcaagcacctggcccccaagggcgccagcgtgctgggcatgatcggcgccggccaccagagcgtgttccagatgaaggccgccgccagggtgaacaagttcgagagggtgctgggctggaacccccaccccgagatgctgggcaggctggccgacaccgccgccgagctgggcctgcccttcgaggccgtggagctggacaggctgggcgccgaggccgacgtgatcatcgccatcaccagcagcttcgcccccctgctgatggacggccacgtgaagggccccacccacatcgccgccatgggcaccgacaccaagggcaagcaggagctggaccccgccctggtggccagggccaggctgttcaccgacgagatcgcccagagcgtgagcatcggcgagtaccagcacgtgatcgccggcaacctggtgcagcaggacgccatcggcgagctgggcgccgtggtgaccggcgacaaccccggcagggagggcgacgaggtgaccatcttcgacggcaccggcgtgggcctgcaggacctggccgtggccgccgccgtggtggagctggccaagcagaagggcgtggcccagagggtggagatc

SEQ ID NO: 99 - DNA, 993 bp, Roseovarius tolerans DSM 11457
atgatggaccagaaggtggagacccagggcatcgtgatcgtgggcgaggagatctgccaggaggtgatcagcagggccgacgccttcagcgccgtggaggccgtgttcggcgccatggccaagggcgacgcctacaacttccccgtggtgagggaggccatcggccacgccgacgccctgtacggcttcaagggcggcttcgacaagagcggcctgaccctgggcctgaaggccggcggctactggcccggcaacatggagaagggcctgaccaaccaccagagcaccgtgtgcctgttcgaccccgacaccggccagctgagcgccctggtgggcggcaactacctgaccgccctgaggaccgccgccagcagcagcgtgagcatcgcccacctggccaggaaggacagcagggtgctgggcatggtgggcgccggccaccagagcgccttccagctgagggccgccgccgagcagagggacttcgacaaggtggtggcctggaacccccaccccgacatgctgcccaggctgcaggccgtggccgaggagctgggcctggccttcgagggcgtgagccaggaggagctgggcgcccaggccgacgtgatcatcaccatcaccagcgccttcgagcccctgctgatggccgactggatcaagcccggcacccacatcgcctgcatgggcaccgacaccaagggcaagcaggaggtggaccccgtgctgttccagagggccaccgtgttcgccgacgagatcgcccagagcatcagcatcggcgaggcccagcacgccgtggcccagggcctgatcgccgagggcgacatcacccccgtgggcgccgtgatcaacggcacccacgccggcagggccagcgccgaggagatcaccctgttcgacggcaccggcgtgggcctgcaggacctggccgtggccagcgtggccgccaggatcgccagggagaggggcctggtgacccccgtgaccctg

SEQ ID NO: 100 - DNA, 963 bp, Jannaschia pohangensis DSM 19073
atgatcatcgtgcccgagagcgccatcgccaacctgatgaccgccgacgacgccttcaaggccgtggaggccgtgttcgccgccatgagcaggggcgacgcctacaacttccccgtgatcagggaggccatcggccacgccgacgccctgtacggcttcaagagcggcttcgacagggccggcctgaacctgggcctgaagagcggcggctactggcccggcaacgccgacaagggcctgaccaaccaccagagcaccgtgttcctgttcgacgccgacaccggcaagtgcagggccgtggtgggcggcaacctgctgaccgccctgaggaccgccgccgccgccgccgtgagcaccgcccacctggccagggaggacgccagggtgctgggcatcgtgggcgccggccaccagagcaccttccagctgaggcaggtggccgccaccagggacttcgagagggtggtggcctggaacaggagccccgagaagctggacaggctggccaaggtggccgccgagctgggcctgcccttcgaggccgtgagcctggagaccctgggcgcccaggccgacgtgatcgtgaccatcgtgagcgcccaggcccccaccctgctggacgcccacgtgaggcccggcacccacatcgcctgcatgggcaccgacaccaagggcaagcaggaggtggaggccgccatcctggccagggccaccgtgttcaccgacgaggtggcccagagcgtgaccatcggcgaggcccagcacgccgtgggccagggcctgatcgccaagggcgacgtgaacgagctgggcgccgtgatcaacggcacccaccccggcaggaggagcggcgacgagatcaccgtgttcgacggcaccggcgtgggcctgcaggacctggccgtggccgccagcgtggtggagagggccatcgccgagggcgtggccgtggaggtggacttc

SEQ ID NO: 101 - DNA, 987 bp, Ruegeria sp. 6PALISEP08
atgaaggacatgcccgacaagcccctgctgatcgtgggcgaggacctgtgccagcagctggtgggcagggccgaggccttcgacgccgtgcagaacgtgttcgccgccatggccaggggcgacgcctacaacttccccgtgatcagggaggccatcggctacgccgacgccctgtacggcttcaagagcggcttcgacagggccggccaggtgctgggcgtgaagagcggcggctactggcccggcaacatggacaagggcctgaccaaccaccagagcaccgtgttcctgttcgaccccgacaccggcaggctgagcgccctggtgggcggcaactacctgaccgccgtgaggaccgccgccagcagcgccgtgagcatcgcccacctggccaggaaggacgccaaggtgctgggcatggtgggcgccggccaccagagcaccttccagctgagggccgccgccgagcagagggacttcgagaaggtggtggcctggaacccccaccccgagatgctgcccaggctgggcgaggtggccgccgagatcggcctggagttcgaggccgtgacccaggaggagctgggcgcccaggccgacgtgatcatcaccatcaccagcgccttcgagcccctgctgatgaaggactggatcaagcccggcacccacctggcctgcatgggcaccgacaccaagggcaagcaggaggtggacgccgccctggtgagccacgccaccgtgttcaccgacgaggtggcccagagcatcagcatcggcgaggcccagcacgccatcgccgacggcaccctgaccaaggtgaggatcaccagcatcggcagcgtgatcaacaacgaccaccccggcaggaccagcgacgacgagatcaccctgttcgacggcaccggcgtgggcctgcaggacctggccgtggccagcgtggccgccaggctggccgaccagagcggcaaggccgagagggccaccctg

SEQ ID NO: 102 - DNA, 963 bp, Mesorhizobium sp. F7
atgatcgtggtgagcgagagggccgtggccgagctgatcacccaggccgactgcctgaccgccgtggagaaggtgttcgccagcatggccaggggcagcgcctacaacttccccgtgatcagggaggccatcggccacgccgacgccctgtacggcttcaagagcggcttcgacagggagagcctggccctgggcctgaagagcggcggcttctggcccggcaacagccagaagggcctgaccaaccaccagagcaccgtgttcctgttcgacgccgacaccggcaggtgcaaggccatggtgggcggcaacctgctgaccgccctgaggaccgccgccgccagcgccgtgagcatcaggcacctggccaggagggactgcagggtgctgggcatgatcggcgccggccaccaggccgccttccagctgagggccgccctggaccagaggtgcttcgagaggatcgtggcctggaacttccaccccgagatgctgggcaggctggccgaggtggccggcgagaggggcatccccttcgaggaggtgagcctggacaggctgggcgccgagagcgacgtgatcgtgaccatcaccagcagcttcagccccctgctgaaggccatgcaggtgaggcccggcacccacctggcctgcatgggcaccgacaccaagggcaagcaggaggtggaggccgagctgctggccgccgccaccgtgttcaccgacgaggtggcccaggccgtgagcatcggcgagagccagcacgccatcggcaggggcctgatcagggagagcgacatcatcgagatcggcgccgtgatcaccaacgcccaccccggcaggaccagcgacgacgagatcaccctgttcgacggcaccggcgtgggcctgcaggacctggccgtggccagcgccgccgtggacctggccatcgccaagggcgccgccgtggaggtggacttc

SEQ ID NO: 103 - DNA, 1002 bp, Neptunomonas antarctica S3-22; identical to SEQ ID NO: 25

SEQ ID NO: 104 - DNA, 963 bp, Oceanicola nitratireducens CGMCC 1.7292
atgctgatcgtgcccgagagggaggtggccggcctgatgaccagggaggccgccttcaccgccgtggagcaggtgttcgccgccatggccaacggcaacgcctacaacttccccgtggtgagggaggccatcggccacgaggacgccctgtacggcttcaagggcggcttcgacaggaccggcctggccctgggcctgaaggccggcggctactggcccaacaacctggagaagaggggcatgatcaaccaccagagcaccgtgttcctgttcgaccccgacaccggcaaggccagggccatggtgggcggcaacctgctgaccgccctgaggaccgccgccgccagcagcgtgagcatcaggcacctggccagggaggagtgcaaggtgatcggcatggtgggcgccggccaccaggccaccttccagctgagggccgccctggagcagagggccttcgagaaggtgatcggctggaacatgcaccccgagatgctgcccaacatcgagaaggtggccgccgaggccggcctgcccttcgaggccgtggagctggacggcctgagggccgccgacgtgatcatcagcatcaccagcagcttcgacgccatcctgaccgccgaccacgtggcccccggcacccacatcgcctgcatgggcaccgacaccaagggcaagcaggaggtgagccccgagctgctgagcaaggccaccgtgttcaccgacgaggtggcccagagcgtgagcatcggcgaggcccagcacgccgtggccctgggcctgatcagggaggccgacatcagccagctgggcgccgtgatcgacggcacccaccccggcaggcagagcgacgaggagatcaccctgttcgacggcaccggcgtgggcctgcaggacctggccgtggccgccgccgtggtggacctggccgtggagaagggcatcgccatcgaggtggacttc

SEQ ID NO: 105 - DNA, 963 bp, Sinorhizobium fredii CCBAU 25509
atgatcatcgtgcccgagaaccagatcgccggcctgatgacccccgccgactgcctggtggccgtggaggaggtgttcgccagcatggccaagaggagcgcctacaacttccccgtgatcagggaggccatcggctacgccgacgccctgtacggcttcaagagcggcttcgacaggagcaacctggccctgggcctgaagagcggcggcttctggcccaacaacgtgcagatcggcctggccaaccaccagagcagcgtgttcctgttcgacgccgacaccggcaagtgcagggccgtggtgggcggcaacctgctgaccgccctgaggaccgccgccgccagcgccatcagcatcaagcacctggccaggaaggacgccaaggtgctgggcatgatcggcgccggccaccagagcgccttccagctgagggccgccgtggagcagaggagcttcgagaagatcctggcctggaacctgcaccccgagatgctgagcaggctggccgaggtggccatggagctgaagctgcccttcaagatcgtggacctggagaggctgggcgccgagagcgacgtgatcatcagcatcaccagcagcttcgcccccatcctgaaggccagccaggtgaggcccggcacccacctggcctgcatgggcaccgacaccaagggcaagcaggagatggaggccgagctggtggccgccgccaccgtgttcaccgacgaggtggcccaggccgtgaccatcggcgagtgccagcacgccatcgagaagaagctgctgagcagggacgacatcaccgagctgggcgccgtgatcaccggcaggcaccccggcaggagcagccccgacgagatcaccctgttcgacggcaccggcgtggccctgcaggacctggccgtggccagcgccgccgtggcccacgccgtgagcaggggcaccgccatcgaggtggacttc

SEQ ID NO: 106 - DNA, 963 bp, Leisingera sp. ANG-M6
atgtacatcgtgcccgagaaggccatcgccgacctggtgaccagggaggccagcttcgacgccgtggagaaggtgttcgccgccatggccgccggcgacgcctacaacttccccgtggtgagggaggccatcggccacgaggacgccctgtacggcttcaagggcggcttcgacagggccggcctgaccctgggcctgaaggccggcggctactggcccaacaacctggagaagaggggcctgatcaaccaccagagcaccgtgttcctgttcgaccccgacaccggcaaggtgaaggccatggtgggcggcaacctgctgaccgccctgaggaccgccgccgccagcagcgtgagcatcaagcacctggccaggcaggacgccaaggtgatcggcatgatcggcgccggccaccaggccaccttccagctgagggccgccctggagcagaggcagttcgagaaggtgatcggctggaactaccaccccgagatgctgcccaacatcgagaaggtggccgccgaggccggcctgcccttcgaggccgtggacctgcccggcatgaccgaggccgacgtgatcatcagcatcaccagcgccttcgcccccagcctgatggccgaccacgtgagccccggcacccacgtggcctgcatgggcaccgacaccaagggcaagcaggaggtggaggccgagctgctggtgaaggccagcgtgttcaccgacgaggtggcccagagcatcaccatcggcgaggcccagcacgccgtggcccagggcctgatccaggagagcgacgtggcccagatcggcgccgtgatcaacggcaccaaccccggcaggaccagcgacgaccagatcaccctgttcgacggcaccggcgtgggcctgcaggacctggccgtggccgccagcgtggtggaggtggccgtggagaagggcatcgccatcgaggtggacttc

SEQ ID NO: 107 - DNA, 963 bp, Leisingera sp. ANG-M7
atgtacatcgtgcccgagaaggccatcgccgacctggtgaccagggaggccagcttcgacgccgtggagaaggtgttcgccgccatggccagcggcgacgcctacaacttccccgtggtgagggaggccatcggccacgaggacgccctgtacggcttcaagggcggcttcgacagggccggcctgaccctgggcctgaaggccggcggctactggcccaacaacctggagaagaggggcctgatcaaccaccagagcaccgtgttcctgttcgaccccgacaccggcaaggtgaaggccatggtgggcggcaacctgctgaccgccctgaggaccgccgccgccagcagcgtgagcatcaagcacctggccaggcaggacgccaaggtgatcggcatgatcggcgccggccaccaggccaccttccagctgagggccgccctggagcagaggcagttcgagaaggtgatcggctggaactaccaccccgagatgctgcccaacatcgagaaggtggccgccgaggccggcgtgcccttcgaggccgtggagctggagggcatgagggaggccgacgtgatcatcagcatcaccagcgccttcgcccccagcctgatggccgaccacgtgagccccggcacccacatcgcctgcatgggcaccgacaccaagggcaagcaggaggtggaggccgagctgctggtgaagagcagcgtgttcaccgacgaggtggcccagagcatcagcatcggcgaggcccagcacgccgtggcccagggcctgatccaggagagcgacgtggcccagatcggcgccgtgatcaacggcaccaaccccggcaggaccagcgacgaccagatcaccctgttcgacggcaccggcgtgggcctgcaggacctggccgtggccgccagcgtggtggaggtggccgtggagaagggcatcgccatcgaggtggacttc

SEQ ID NO: 108 - DNA, 963 bp, Loktanella maricola DSM 29128
atgatcgtggtgcccgagaaggagatcgccggcctgctgaccagggccgacgccttcgacgccgtggagaaggtgttcgccagcatgagcaagggcagcgcctacaacttccccgtgatcagggaggccatcggctacgaggacgccctgtacggcttcaagggcggcttcgacaacaccggcatggccctgggcctgaaggccggcggctactggcccaacaacctggagaagcacggcgagatcaaccaccagagcaccgtgttcctgttcgaccccgacaccggcaaggtgaaggccatggtgggcggcaacctgctgaccgccctgaggaccgccgccgccagcagcgtgagcatcaagcacctggccaggaaggacgccaaggtgatgggcatggtgggcgccggccaccaggccaccttccagctgagggccgccctggagcagagggagttcgagaaggtgatcggctggaactaccaccccgagatgctgcccaacatcgagaaggtggccgacgaggccggcgtgcccttcgaggccgtggagctggacggcctggtggaggccgacgtggtgatcagcatcaccagcaccttcgcccccaccatcatggccaaccacatcgcccccggcacccacatcgcctgcatgggcaccgacaccaagggcaagcaggaggtggaggccgccctgctggcccagaccaccgtgttcaccgacgaggtggcccagagcatcagcatcggcgaggcccagcacgccatcgccgccggcctgatccagcagagcgacgtgaacgagctgggcgccgtgatcaacggcacccaccccggcaggaccagcgacgacgagatcaccctgttcgacggcaccggcgtgggcctgcaggacctggccgtggccagcagcatcgtggacctggccgtggagaagggcatcgccaccatcgtggagttc

SEQ ID NO: 109 - DNA, 963 bp, Loktanella sediminum DSM 28715
atgatcatcgtgcccgagagggagatcgccggcctgatgaccaggaaggccgccttcgacgccgtggagaaggtgttcgccgccatgagcgccggcgacgcctacaacttccccgtggtgagggaggccatcggccacgaggacgccctgtacggcttcaagggcggcttcgaccaggccggcctgaccctgggcctgaaggccggcggctactggcccaacaacctggagaagaggaacctgatcaaccaccagagcaccgtgttcctgttcgaccccgacaccggcaaggccaaggccatggtgggcggcaacctgctgaccgccctgaggaccgccgccgccagcagcgtgagcatcaagcacctggccaggaaggacgccaaggtgatcggcatggtgggcgccggccaccaggccaccttccagctgagggccgccctggagcagagggacttcgagaaggtgatcggctggaacctgcaccccgagatgctgcccaacatcgagaaggtggccgaggaggccggcctgcccttcgaggccgtggacctgagcggcatgaccgaggccgacgtgatcatcagcatcaccagcagcttcgcccccagcctgatggccgaccacgtgagcagcggcacccacatcgcctgcatgggcaccgacaccaagggcaagaaggaggtggaggccgccctgctggagaccgccaccgtgttcaccgacgaggtggcccagagcatcagcatcggcgaggcccagcacgccatcgccgagggcctgatcagccagaacgacgtgaacgagctgggcgccgtgatcaacggcacccacgccggcaggatcgacgaggaccagatcaccctgttcgacggcaccggcgtgggcctgcaggacctggccgtggccgccagcgtggtggacctggccgccgccaagggcatcgccatcgaggtggacttc

SEQ ID NO: 110 - DNA, 963 bp, Tateyamaria sp. ANG-S1
atgctgatcgtgcccgagaaggacatcgccgacctgatgaccaggcaggccgccttcgacgccgtggagcaggtgttcgccgccatggccgccgaggacgcctacaacttccccgtggtgagggaggccatcggccacgaggacgccctgtacggcttcaagggcggcttcgacagggccggcgccaccctgggcctgaaggccggcggctactggccccacaacctggagaagagggacctgatcaaccaccagagcaccgtgttcctgttcgaccccgacaccggcaagcccgccgccatggtgggcggcaacctgctgaccgccctgaggaccgccgccgccagcagcgtgagcatcaagcacctggccaggcccgacgccaaggtgctgggcatgatcggcgccggccaccaggccaccttccagctgagggccgccctggagcagagggacttcgagagggtgatcggctggaactaccaccccgacatgctgcccaacatcgccaaggtggccgaggaggccggcctgcccttcgaggccgtggacctgcccggcatggtggacgccgacgtgatcatcagcatcaccagcgccttcgcccccagcctgatggccgaccacgtgagccccggcacccacatcgcctgcatgggcaccgacaccaagggcaagcaggaggtggaggccgccctgttcgccagggccaccgtgttcaccgacgaggtggcccagagcgtgagcatcggcgaggcccagcacgccatcgccgccgagctgatcgaggccagcgacatccaccagatcggcgccgtgatcaacggcgcccaccccggcaggagcggcgacaccgacatcaccctgttcgacggcaccggcgtgggcctgcaggacctggccgtggccgccagggtggtggacctggccgagaagaagggcatcgccatccacgtggacttc

SEQ ID NO: 111 - DNA, 963 bp, Labrenzia alexandrii CECT 5112
atgatcatcgtgcccgagaaggagatcgccgccctgctgggcagggccgaggccttcgaggccgtggagagcgtgttcgccgccatgagcagcggcgtggcctacaacttccccgtgatcagggaggccatcggccacgccgacgccctgtacggcttcaagagcggcttcgacaggagcagcctggccctgggcctgaagagcggcggctactggcccggcaacgccgacaacggcctgaccaaccaccagagcaccgtgttcctgttcgacgccgacaccggcaaggccagggccgtggtgggcggcaacctgctgaccgccctgaggaccgccgccgccagcgccgtgagcatcaagcacctggccaggaaggacgccaaggtgctgggcatgatcggcgccggccaccagagcgccttccagatgagggccgccgtggagcagaggagcttcgagaaggtgatcggctggaacctgcaccccgagatgctgagcaggctggaggagaccgccgccgagctggacctgcccttcgaggccgtggacctggacaggctgggcgccgaggccgacgtgatcatcagcatcaccagcagcttcgaccccatcctgaaggtgagccaggtgacccccggcacccacctggcctgcatgggcaccgacaccaagggcaagcaggaggtggaggccgagctggtggccaaggccaccgtgttcaccgacgaggtggcccagagcagcaccatcggcgagtgccagaacgccgtggccagcggcctgatcagcgagagcgacatcaacgagatcggcgccgtgatcaacggcaaccacaagggcaggaccagcgtggaggagatcaccctgttcgacggcaccggcgtgggcctgcaggacctggccgtggccagcgccgtggtggacctggccgtggagaagggcatcgccatcagcgtggacttc

SEQ ID NO: 112 - DNA, 1014 bp, Roseovarius litoreus DSM 28249
atgaacgacctgagcgcccaggcccccaaggccgcccaggccggcaacaccgtgaccatcgtgcccgaggccgagatcgccggcctgatgacccccgaggccgccttcgacgccgtggaggccaccttcgccgccatggccaggggcgacgcctacaacttccccgtgatcagggaggccatcggccacgccgacgccctgtacggcttcaagagcggcttcgacagggagagcctggccctgggcctgaagagcggcggctactggcccggcaacgaggccaggggcctgaccaaccaccagagcaccgtgatcctgttcgacgccgacaccggcaggcccagcgccctggtgggcggcaacctgctgaccgccctgaggaccgccgccgccagcgccgtgagcatcaggtacctggccaggcaggacgccaaggtgctgggcatgatcggcgccggccaccagagcgccttccagatgagggccgccgtgcagcagaggagcttcgagaaggtggtgggctggaactaccaccccgagatgctgagcaggctggccgacaccgccgccgagctgggcctgcccttcgaggccgtgaccctggaggagctgggcgcccaggccgacgtgatcgtgaccatcaccagcagcttcgcccccagcctgctggacgcccacgtgaggcccggcacccacctggcctgcatgggcaccgacaccaagggcaagcaggaggtggaggccggcctgctggccagggccagggtgttcaccgacgaggtggcccagagcgtgaccctgggcgaggcccagcacgccgtggccgagggcctgaccagcgccgacgacatcacccagctgggcgccgtgatcaacggcacccaccccggcaggaccagcgaccaggagatcaccatgttcgacggcaccggcgtgggcctgcaggacctggccgtggccgccgccgtggtgaggctggccagggagcagggcgtggccagccaggtggtgctg

SEQ ID NO: 113 - DNA, 963 bp, Labrenzia sp. CP4
atgatcatcgtgcccgagaaggagatcgccggcctgatcggcaggcaggagagcttcgacgccgtggagagcgtgttcgccgccatggccggcggcgccgcctacaacttccccgtgatcagggaggccatcggccacgccgacgccctgtacggcttcaagagcggcttcgacaggagcagcctggccctgggcctgaagagcggcggctactggcccggcaacatggccaagggcctgaccaaccaccagagcaccgtgttcctgttcgacgccgacaccggcaaggccaaggccgtggtgggcggcaacctgctgaccgccctgaggaccgccgccgccagcgccgtgagcatcaagcacctggccaggaaggacgccaaggtgctgggcatgatcggcgccggccaccagagcgccttccagatgagggccgccgtggagcagagggacttcgagaaggtgctgggctggaacctgcaccccgagatgctggtgaggctggaggagaccgccaacgagctgggcctgccctacgagagcgtggacctggccaggctgggcaccgaggccgacgtgatcatcagcatcaccagcagcttcgaccccatcctgatggaggagcacgtgagccccggcacccacatcgcctgcatgggcaccgacaccaagggcaagcaggaggtggacgtggccctggtggccaaggccaagctgttcaccgacgaggtggcccagagcgccaccatcggcgagtgccagcacgccgtggccagcggcatcgtgagcgaggacaacatcatcgagatcggcgccgtgatcaacggcaaccaccccggcaggaccagccagagcgacatcaccctgttcgacggcaccggcgtgggcctgcaggacctggccgtggccagcgccgccgtggacctggccatccagaagggcgtggccatcgaggtggacttc

SEQ ID NO: 114 - DNA, 963 bp, Rhizobium sp. N541; identical to SEQ ID NO: 71

SEQ ID NO: 115 - DNA, 960 bp, Paracoccus sp. MKU1
atgctggtggtggccgagaaggagatcgccggcctgatgacccccgaggccgccttcgaggccatcgaggccgtgttcgccagcatggccaggaggaaggcctacaacttccccgtggtgagggaggccatcggccacgaggacgccctgtacggcttcaagggcggcttcgacgccagcgccctgaccctgggcctgaaggccggcggctactggcccctgaaccagaagcacaacctgatcaaccaccagagcaccgtgttcctgttcgaccccgacaccggcagggtgagcgccgccgtgggcggcaacctgctgaccgccctgaggaccgccgccgccagcgccgtgagcatcaagtacctggcccccaagggcgccaaggtgctgggcatgatcggcgccggccaccagagcgccttccagatgagggccgccgccaacgtgcacaggttcgagaaggtgatcggctggaacccccaccccgagatgctgggcaggctggccgacaccgccgccgagctgggcctgcccttcgaggccgtggacctgcccaggctgggcgccgaggccgacgtgatcatcagcatcaccagcagcttcagccccctgctgatgaacgagcacgtgaagggccccacccacatcgccgccatgggcaccgacaccaagggcaagcaggagctggaccccgccctggtggccagggccaggatcttcaccgacgaggtggcccagagcgtgagcatcggcgagtgccagcacgccatcgccagcaagctgatcgccgaggagcagatcggcgagctgggcgccgtggtggccggcgacaaccccggcaggggcgacgccgaggtgaccctgttcgacggcaccggcgtgggcctgcaggacctggccgtggccaaggccgtggtggagctggccaagcacaagggcgtggcccaggaggtggagatc

SEQ ID NO: 116 - DNA, 963 bp, Pseudoruegeria marinistellae SF-16
atgctgatcgtgcccgagagggagatcgccaacctgatgaccagggaggccgccttcgaggccgtgcagaaggtgttcgccgccatggccagcggcgacgcctacaacttccccgtggtgagggaggccatcggccacgaggacgccctgtacggcttcaagggcggcttcgacagggccggcctgaccctgggcctgaaggccggcggctactggcccaacaacctggagaagcacggcatgatcaaccaccagagcaccgtgttcctgttcgaccccgacaccggcagggccaccgccatggtgggcggcaacctgctgaccgccctgaggaccgccgccgccagcagcgtgagcatcgcccacctggccagggaggacgccagggtgatcggcatgatcggcgccggccaccaggccaagttccagctgagggccgccctggagcagaggagcttcgagaaggtgatcggctggaacctgcaccccgagatgctgcccaacctggaggaggtggccagcgaggccggcctgcccttcgaggccgtggagctggacggcatcagggacgccgacgtgatcatcagcatcaccagcagcttcgacgccatcctgaccgccgaccaggtgagccccggcacccacatcgcctgcatgggcaccgacaccaagggcaagcaggaggtggaccccgccctgctggccagggccaccgtgttcaccgacgaggtggcccagagcatcagcatcggcgaggcccagcacgccatcgccagcggcctgatcgccgagaacgacatcgcccagctgggcagcgtgatcaacggcacccaccccggcaggaccagcgccgagcagatcaccctgttcgacggcaccggcgtgggcctgcaggacctggccgtggccgccgccgtggtggacctggccgccaggaacggcagcgccatcgaggtggacttc

SEQ ID NO: 117 - DNA, 963 bp, Ruegeria conchae DSM 29317
atgatcatcgtgcccgagaaggagatcggcgccctgctgggcaggaacgagagctacgaggccatcgagcaggtgttcgccgccatggccgccggcgacgcctacaacttccccgtggtgagggaggccatcggccacgccgacgccctgtacggcttcaagggcggcttcgacagggccggcatgaccctgggcctgaaggccggcggctactggcccaacaacctggagacccacggcctgatcaaccaccagagcaccgtgttcctgttcgaccccgacaccggcagggtgaaggccatcgtgggcggcaacctgctgaccgccctgaggaccgccgccgccagcagcgtgagcatcaaccacctggccaggaaggacgccaaggtgatcggcatggtgggcgccggccaccaggccaagttccagctgagggccgccctggagcagagggagttcgagaaggtgatcggctggaacctgcaccccgacatgctgcccaacatcgaggaggtggccagcgaggccggcctgcccttcgaggccgtggagctgcccggcatggtggaggccgacgtgatcatcaccatcaccagcagcttcgcccccaccctgatgagcgaccacgtgagcgacggcacccacgtggcctgcatgggcaccgacaccgtgggcaagcaggaggtgggcgtggacctgatcaacagggccaccgtgttcaccgacgaggtggcccagagcatcaccctgggcgagtgccagcacgccgtggccagcggcagcaagaccgagaccgacatcaggcagatcggcgaggtgatcaacggcacccaccccggcaggcagagcgaccaggaggtgaccctgttcgacggcaccggcgtgggcctgcaggacctggccgtggccagcgccgtggtggagctggccgtggagcagggcatcgccatcgaggtggacttc

SEQ ID NO: 118 - DNA, 963 bp, Labrenzia sp. C1B10
atgatcatcgtgcccgagaaggagatcgccggcctgatcggcaggcaggagagcttcgacgccgtggagagcgtgttcgccgccatggccggcggcgccgcctacaacttccccgtgatcagggaggccatcggccacgccgacgccctgtacggcttcaagagcggcttcgacaggagcagcctggccctgggcctgaagagcggcggctactggcccggcaacatggccaagggcctgaccaaccaccagagcaccgtgttcctgttcgacgccgacaccggcaaggccaaggccgtggtgggcggcaacctgctgaccgccctgaggaccgccgccgccagcgccgtgagcatcaagcacctggccaggaaggacgccaaggtgctgggcatgatcggcgccggccaccagagcgccttccagatgagggccgccgccgagcagagggacttcgagaaggtgctgggctggaacctgcaccccgagatgctggtgaggctggaggagaccgccaacgagctgggcctgccctacgagagcgtggacctggccaggctgggcgccgaggccgacgtgatcatcagcatcaccagcagcttcgaccccatcctgatggaggagcacgtgagccccggcacccacatcgcctgcatgggcaccgacaccaagggcaagcaggaggtggacgtggccctggtggccaaggccaagctgttcaccgacgaggtggcccagagcgccaccatcggcgagtgccagcacgccgtggccagcggcatcgtgagcgaggacaacatcatcgagatcggcgccgtgatcaacggcaaccaccccggcaggaccagccagagcgacatcaccctgttcgacggcaccggcgtgggcctgcaggacctggccgtggccagcgccgccgtggacctggccatccagaagggcgtggccatcgaggtggacttc

SEQ ID NO: 119 - DNA, 963 bp, Methylobacterium radiotolerans NDB3P7
atgatcatcgtgcccgagcacgccatcgacggcctgctgaccgaggccgagtgcttcggcgccgtggagcaggtgttcgccagcatggccaggaggagggccggcaacttccccgtggtgagggaggccatcggccacgccgacgccctgtacggcttcaagagcggcttcgacagggacagcctggccctgggcctgaaggccggcggcttctggcccggcaacgccgccaagggcctgaccaaccaccagagcaccgtgttcctgttcgacgccgacaccggcaggtgcagggccgtggtgggcggcaacctgctgaccgccctgaggaccgccgccgcctgcgccatcagcatcaggcacctggccagggagggcgccagggtgctgggcatgatcggcgccggccaccagagcgccttccagctgagggccgccctggcccagaggcccttcgagagggtgctggcctggaacctgcaccccggcatgttcggcaggatggaggccgtggccagggagaggggcgtgcccttcgaggtggtggacctggacaggctgggcgccgaggccgacgtggtggtgaccatcaccagcagcttcgcccccatcctgaaggccgcccaggtgaggcccggcacccacgtggcctgcatgggcaccgacaccaggggcaagcaggaggtggaggccgagctgctggccgccgccaccgtgttcaccgacgaggtggcccagagcgtgagcctgggcgaggcccagcacgccgtggccaggggcctgctggccgccgacagcatcgtggagatcggcgccgtgatcaacggcgaccaccccggcagggtgagcgacgccgagatcaccgtgttcgacggcaccggcgtgggcctgcaggacctggccgtggccgccgtggccgtggacagggccctggccaagggcctggccaccgaggtgggcttc

SEQ ID NO: 120 - DNA, 1035 bp, Colwellia psychrerythraea 34H
atgagcgacagcaaggagaaccacgcccccgagaaccacagccacaagaacagcctgcccgtgaacaagggcgtgagcgtggtgagcgaggccgtgtgccaggaggtgatgggcagggccgacgccttcaccgccgtggagaacgtgttcagcgccatggccaagaacaccgcctacaacttccccgtgatcagggaggccatcggccacgccgacgccctgtacggcttcaagagcggcttcgacagggacggcatggtgctgggcctgaagagcggcggctactggcccggcaacgtgcagaaggacctgaccaaccaccagagcaccgtgatcctgttcgaccccgacaccggccagctgaagagcctggtgggcggcaactacctgaccgccgtgaggaccgccgccagcagcgccgtgagcatcgcccacctggccaggaaggacagcaaggtgctgggcatggtgggcgccggccaccagagcaccttccagctgagggccgccgtggagcagagggagttcgagaagatcgtgtgctggaacttccaccccgagcagatccccaagctggccgccgtggccgaggagctgggcctgcccttcgagagcgtgaccagggaggagctgtgcgcccaggccgacgtgatcatcaccatcaccagcgccttcgaggccctgatcgacaaggactggatcaagcccggcacccacatcgcctgcatgggcaccgacaccgtgggcaagcaggaggtggacgccaagctgctggccgtggccaaggtgttcaccgacgagctggcccagagcatcaccctgggcgaggcccagcacgccatcgcccagaagctgatccagcagagcgacatcgtgcccatcggcgaggtgatcaacggcaccaagaccggcaggaccagcgccgaggacatcaccctgttcgacggcaccggcgtgggcctgcaggacctggccgtggccagcgtggccgccgagctggccgaggccaagggccaggtgacctacttcaacctg

SEQ ID NO: 121 - DNA, 999 bp, Psychrobacter arcticus 273-4
atgagcgaggccaacagcgtgaacagcaacgagggcctgctgatcgtgagcgaggacgcctgcaagagcgtgatcgacaggcccagcgccttcatcgccgtggagaacgtgttcgccagcatgagcaggggcgacgcctacaacttccccgtgatcagggaggccatcggctacgccgacgccctgtacggcttcaagagcggcttcgacagggccggcaagagcctgggcctgaagagcggcggctactggcccggcaacgccgccaagggcctgaccaaccaccagagcaccatcttcctgttcaaccccgacaacggcaagctgagggccctggtgggcggcaactacctgaccgccgtgaggaccgccgccgccagcgccgtgagcatcgcccacctggccaggaaggacagcaaggtgctgggcatggtgggcgccggccaccagagcaccttccagctgagggccgccctggagcagaggagcttcgagaaggtggtggcctggaacaagaacaaggacaggctgaagaacctgcaggccgtggccgaggagctgggcgtgcccttcgaggccgtggagagggagcagctgtgcagcgaggccgacgtgatcatcaccatcaccagcgccttcgagcccctgctgatgaaggagtggatcaagcccggcacccacatcgcctgcatgggcaccgacaccgtgggcaagcaggaggtggacgtgaacctggtggccagcgccaccgtgttcaccgacgagatcgcccagagcatcagcctgggcgaggcccagcacgccatcaagagcggcgccatcaaggagagcgacatcaccaccctgggcgacgtgatcaacggcgaccaccccggcaggagcagcgacgacgagatcaccctgttcgacggcaccggcgtgggcctgcaggacctggccgtggccagcgccgccgccaagctggccctggagaagggcgaggcccagcacatcagcctg

SEQ ID NO: 122 - DNA, 1002 bp, Roseovarius sp. 217
atgatgaacacccagaacgaggtgagcgccgacggcttcgtgatcgtgggcgaggagatctgccagaagatcatcagcagggccgacgccttcggcgccgtggaggccgtgttcgccgccatggccaggggcgacgcctacaacttccccgtggtgagggaggccatcggccacgccgacgccctgtacggcttcaagggcggcttcgacaggagcggcctgagcctgggcctgaaggccggcggctactggcccggcaacatggacaagggcctgaccaaccaccagagcaccgtgttcctgttcgaccccgacaccggcaggctgagcgccctggtgggcggcaactacctgaccgccctgaggaccgccgccagcagcagcgtgagcatcgcccacctggccaggaacgacagcaaggtgctgggcatggtgggcgccggccaccagagcaccttccagctgagggccgccgtggagcagagggccttcgagaaggtggtggcctggaacccccaccccgacatgctgcccaggctgggcgccgtggccgaggagctgggcctggagttcgaggccgtgacccaggaggagctgggcgcccaggccgacgtgatcatcaccatcaccagcgccttcgagcccctgatgatggccgactgggtgaagcccggcacccacatcgcctgcatgggcaccgacaccaagggcaagcaggaggtggaccccgccctgttccagagggccgccgtgttcgccgacgagatcgcccagagcatcagcatcggcgaggcccagcacgccgtgggcaagggcctgatcgccgaggccgacatcacccccatcggcgccgtgatcaacggcacccacaccggcaggagcaacgccgaggagatcaccctgttcgacggcaccggcgtgggcctgcaggacctggccgtggccagcgtggccgccaagctggccagggagcagggcctggtgacccccatcaccctgggc

SEQ ID NO: 123 - DNA, 1002 bp, Marinobacter sp. ELB17
atggagacccccagcgaggccctgatccagccccaccagatcctgatcatcagcgaggacacctgccagaaggtgatcggcaggcccgaggccttccaggccgtggagagcgtgttcagcagcatggccaagggcagcgcccacaacttccccgtggtgagggaggccatcggccacgccggcgccctgtacggcttcaagagcggcttcgacagggagggcctggtgctgggcgtgaaggccggcggctactggcccagcaacgtggtgaagggcctgaccaaccaccagagcaccgtggccctgttcgaccccaacaccggccagctgaaggccctggtgggcggcaactacctgaccgccatcaggaccgccgccagcagcgccgtgagcatcgcccacctggccaggaagaacgccaaggtgctgggcatgatcggcgccggcttccagagcaccttccagctgagggccgccatcgagcagagggacttcgagaaggtggtggcctggaacacccaccccgagcacctgaccaggctggccgacgtgtgcagggagcacgacctgcccttcgaggccgtgagcctgcaggccctgggcgcccagagcgacgtgatcatcaccatcaccagcgccagcgagcccctgctgcaggccggctggatcaagcccggcacccacctggcctgcatgggcaccgacaccaagggcaagcaggagatcgaccacaggctgctggcccaggccaccgtgttcaccgacgagatcgaccagagcatcagcatcggcgaggcccagcacgccgtggccgccagggtgctgagggccgagcagatcacccccatcggcgaggtgatcaacggcagccaccagggcaggcagagcgagcaggagatcaccctgttcgacggcaccggcgtgggcctgcaggacctggccgtggccagcgccgccgccagcatcgccgaggccaggggcctggtgcagagggtgaccctg

SEQ ID NO: 124 - DNA, 963 bp, Rhizobium leguminosarum bv. trifolii WSM597
atgatcatcgtgcccgagagcgccatcggcgagctggtgagcctgggcgactgcgtggacgccgtggagaagaccttcgtgagcatggccgagaggagcgcccacaacttccccgtggtgagggaggccgtgggctacgccgacgccctgttcggcttcaagagcggcttcgacagggagggcctggccctgggcctgaaggccggcggcttctggcccaacaacagcgacaagggcctgaccaaccaccagagcaccgtgttcctgttcgaccccgagaccggcaggtgcagggccgtggtgggcggcaacctgctgaccgccctgaggaccgccgccgccagcgccatcagcatcaagcacctggccaggagggacgccaaggtgctgggcatggtgggcgccggccaccaggccagcttccagctgagggccgccgtgcagcagaggcagttcgagaaggtggtggcctggaactaccaccccgagatgctgcccaagctggccgccgtggccaaggagctggccgtgcccttcgaggccgtggacctggagaggctgggcgacgaggccgacgtgatcatcaccatcaccagcagcttccagcccatcctgaaggccagccagatcaggcccggcacccacctggcctgcatgggcaccgacaccaagggcaagcaggaggtggaccccgccctggtggccgccgccaccctgttcaccgacgagatcgcccaggccatcagcatcggcgagtgccagcacgccgtggcccagggcatgatcgcccccatcgacatcgccgagatcggcgccgtgatcaacggccaggagagcggcaggaccagccccgaggaggtgaccctgttcgacggcaccggcgtgggcctgcaggacctggccgtggcccaggccgccgtggagctggccctggccaggggcatcgccgtggaggtggacttc

SEQ ID NO: 125 - DNA, 963 bp, pMeth_A285
atgtacatcgtgcccgagcaggagatcgccgacctgatgaccaggaaggccgccttcgacgccgtggagaaggtgttcgccgccatggccgccggcgacgcctacaacttccccgtggtgagggaggccatcggccacgaggacgccctgtacggcttcaagggcggcttcgacagggccggcctgaccctgggcctgaaggccggcggctactggcccaacaacctggagaagaggggcctgatcaaccaccagagcaccgtgttcctgttcgaccccgacaccggcaaggtgaaggccatggtgggcggcaacctgctgaccgccctgaggaccgccgccgccagcagcgtgagcatcaagcacctggccaggaaggacgccaaggtgatcggcatgatcggcgccggccaccaggccaagttccagctgagggccgccctggagcagagggagttcgagaaggtgatcggctggaacctgcaccccgagatgctgcccaacctgcaggaggtggccgacgaggccggcctgcccttcgaggccgtggagctggagggcctgagggaggccgacgtgatcatcagcgtgaccagcagcttcgacgccatcctgaaggtggaccaggtgagccccggcacccacatcgcctgcatgggcaccgacaccaagggcaagcaggaggtggacccccagctgctggtgaccgccgacgtgttcaccgacgagatcgcccagagcgtgagcatcggcgaggcccagcacgccgtggcccagggcctgatcaaggaggccgacgtggcccagatcggcgccgtgatcaacggcaccaaccccggcaggaccagcgacggccagatcaccctgttcgacggcaccggcgtgggcctgcaggacctggccgtggccgccagcgtggtggagagggccgtggaggccggcatcgccatcgaggtggacttc

SEQ ID NO: 126 - DNA, 975 bp, Roseobacter litoralis Och 149
atgagcaagggcctgctgatcgtgggcgaggacatgtgcgccgaggtggtgagcagcgccgacgccttcaccgccgtggaggccgtgttcggcgccatggccaagggcgacgcctacaacttccccgtgatcagggaggccatcggctacgccgacgccctgtacggcttcaagagcggcttcgacaaggccggcaagaccctgggcgtgaagagcggcggctactggcccggcaacatggacaagggcctgaccaaccaccagagcaccatcttcctgttcgaccccgacaccggcatgctggaggccctggtgggcggcaactacctgaccgccgtgaggaccgccgccagcagcagcgtgagcatcgcccacctggccaggaaggacgccaaggtgctgggcatggtgggcgccggccaccagagcaccttccagctgagggccgccgccgagcagaggagcttcgagaaggtggtggcctggaacccccaccccgacatgctgcccaggctgggcgccgtggccgaggagctgggcctggagttcgaggccgtgacccaggaggagctgggcgcccaggccgacgtgatcatcaccatcaccagcgccttcgagcccctgctgatgaaggactggatcaagcccggcacccacatcgcctgcatgggcaccgacaccaagggcaagcaggaggtggaccccgagctgctggccagcgccaccgtgttcgccgacgagatcgcccagagcatcaccatcggcgaggcccagcacgccgtggccagcggccacctgagcgagagcgacatcacccccatcggcgccgtgatcaacggcacccacgccggcaggagcagcgaccaggagatcaccctgttcgacggcaccggcgtgggcctgcaggacctggccgtggccagcgtggccgccagggaggccgagagcaggggcaaggccaccaggatcgccctg

SEQ ID NO: 127 - DNA, 963 bp, Octadecabacter antarcticus 307
atgtacatcgtgcccgagagcgccatcgccgacatcctgaccaggcccgacgccttcgacgccgtggagaaggtgttcgccgccatgagcgccggcgacgcctacaacttccccgtgatcagggaggccatcggccacgaggaggccctgtacggcttcaagggcggcttcgacggcgtgggcaagagcctgggcctgaaggccggcggctactggccccacaacctggagaagaggggcatcatcaaccaccagagcaccgtgttcctgttcgaccccgacaccggcaaggtggccgccatggtgggcggcaacctgctgaccgccctgaggaccgccgccgccagcagcgtgagcatcaagcacctggccaggaaggacgccaaggtgatgggcatgatcggcgccggccaccaggccaagttccagctgaggcacgccctggagacccacaacttcgagaaggtgatcggctggaactaccaccccgagatgctgcccagcctggccgaggtggccgccgagttcgacctgcccttcgaggccgccagcctgaagggcatggtggaggccgacgtggtgatcagcatgaccagcagcttcaaccccatcttcggcgccgcccacatcagcgacggcacccacatcgcctgcatgggcaccgacaccgtgggcaagcaggagtgcgacaccgacctgatcgtgaaggccaccatcttcaccgacgaggtggcccagagcgtgaccctgggcgagacccagcacgccgtggccgccggcctgaagagcagggacgacatcttcgagctgggcgccgtgatcaacggcacccacgccggcaggaagagcgagaacgagatcaccctgttcgacggcaccggcgtgggcctgcaggacctggccgtgagcgccagcatcgtggagatcgccaaggccaagggcatcggcatggaggtggacttc

SEQ ID NO: 128 - DNA, 963 bp, Methylopila sp. M107
atgctgatcgtgcccgagaacaaggtggccgagctgatcaacaccgccgagtgcttcagcgccgtggagaacgtgttcgccagcatggccagcaagagcgccaacaacttccccgtggtgagggaggccatcggccacgccgacgccctgtacggcttcaagagcggcttcgacagggagaccctggccctgggcgtgaagagcggcggcttctggcccggcaacgccgccaggggcctggtgaaccaccagagcagcatcttcctgttcgacgccgacaccggcaggtgcagggccgtggtgggcggcaacctgatcaccgccatcaggaccgccgccgccagcgccgtgagcatcaagcacctggccaggaaggacgccaagaccatcggcatgatcggcgccggccaccagagcgccttccagctgagggccgccctggagcagaggcccttcgacagggtgctgggctggaacgtggagcccaagatgctgcagaggctgagggacgtggccgacgagaggggcgtggccttcgaggccgtgggcctggacaggctgggcgccgaggccgacgtgatcatcaccatcaccagcagcttcgcccccatcctgaaggccagccacatcaggcccggcatccacctggcctgcatgggcaccgacaccaggggcaagcaggaggtggaggccgagctgaccgccagcgccatcctgttcaccgacgagatcgtgcaggccgtgaccatcggcgagtgccagcacgccgtggccgccggcctggtgagccaggacgagatcgccgagctgggcgccgtgatcaacggcagcgaccccggcaggaggagcgacgaggagatcaccctgttcgacggcaccggcgtgggcctgcaggacctggccgtggccaccagggtggtggacagggccatcgagaccggcgccgccatcgaggtggagtac

SEQ ID NO: 129 - DNA, 963 bp, Loktanella sp. SE62
atgatcatcgtgcccgaggccgccatcgccgacctgatcaccagggccgacgcctacagggccgtggagaacgtgttcgccagcatgagcaagggcagggcctacaacttccccgtgatcagggaggccatcggccacgccgacgccctgtacggcttcaagagcggcttcgacagggacggcctggccctgggcatgaagagcggcggctactggcccaggaacgccgacaacggcctgaccaaccaccagagcaccgtgttcctgttcgacgccgacaccggcaagtgcagggccgtggtgggcggcaacctgctgaccgccctgaggaccgccgccgccagcgccgtgagcatcaaccacctggccaggcaggacgccaaggtgctgggcatgatcggcgccggccaccagagcgccttccagctgagggccgccgtggagcagagggacttcgacaggatcgtgggctggaactaccaccccgacatgctgcccaggctggccaaggtggccgccgaggtgggcctgcccttcgaggccgtgagcctggacgagctgggcgcccaggccgacgtgatcatcagcatcaccagcgccttcgcccccagcctgatggacgccgacgtgaggcccggcacccacatcgcctgcatgggcaccgacaccaagggcaagcaggagctggaccccgccctgctggccagggccaccatcttcaccgacgagatcgcccagagcgtgaccatcggcgaggcccagcacgccatcagcgccaagctgatcaccgagagcgacatcagcgagatcggcgccgtgatcaacggcacccaccccggcaggagcgacgccgaggagatcaccatcttcgacggcaccggcgtgggcctgcaggacctggccgtggccgccgccgtggtggacctggccgtggccaagggcgtggccaccgaggtggacttc

SEQ ID NO: 130 - DNA, 963 bp, Phaeobacter gallaeciensis ANG1 (ANG1); identical to SEQ ID NO: 24

SEQ ID NO: 131 - DNA, 960 bp, Rhodobaca barguzinensis DSM 19920
atgtggatcgtgcccgagagcgccatccccggcctggtggacgagcagagcgccttcgacgccatcgaggccaccttcgccgccatgagcaggggcgacgcctacaacttccccgtggtgagggaggccctgggcgagggcaggcagtacggcttcaagagcggcctggacagggtgggcgccctgctgggcgtgaaggccggcggctacttccccggcaacgccgagaggggcatccccaaccaccagagcaccgtgtacctgttcgaccccgacagcggcaagcccaccgccatggtgggcggcaacctgctgaccgccctgaggaccgccgccgccagcgccatcagcatcaagcacctggccagggccgacagcgaggtgctgggcatggtgggcgccggccaccagagcgccttccagatgagggccgccgtgagggccaggggcttcaagaaggtgatcggctggaactaccaccccgagatgctgagcaggctggccgacaccgccgccgagctgggcctgcccttcgaggccgtgagcctggagcagctgggcgccgaggccgacgtgatcatcaccatcaccagcagcttcgacgccatcgtgcaggacgcccacatcaggcccggcacccacctggcctgcatgggcaccgacaccaagggcaagcaggaggtggaggccgccatcctggccagggccagcgtgttcaccgacgaggtggcccagagcgtgagcatcggcgaggcccagcacgccgtggccgccggcctgctgagcgagggcgccatcaccgagatcggcgccgtgatcaacggcgcccacgccggcagggccggcgccgaggagatcaccgtgttcgacggcaccggcgtgggcctgcaggacctggccgtggccagcagggccgtggagctggccgtggagaggggcctggcccagcagatcgccttc

SEQ ID NO: 132 - DNA, 990 bp, Mameliella alba DSM 26384
atgaaggacatgcccgagacccagggcctggtgatcgtgggcgaggccgagtgcgagaggctggtgggcaggaaggacgccttcgacgccgtggaggccgtgttcggcgccatggccaagggcgacgcctggaacttccccgtggtgagggaggccatcggctacgccgacgccctgtacggcttcaagagcggcttcgacaaggccggcaaggtgctgggcgtgaagagcggcggctactggcccggcaacatggacaaggagctgaccaaccaccagagcaccgtgttcctgttcgaccccgacaccggccagctggccgccctggtgggcggcaactacctgaccgccgtgaggaccgccgccagcagcgccgtgagcatcgcccacctggccaggaaggacgccaaggtgctgggcatggtgggcgccggccaccagagccagttccagctgagggccgccgccgagcagagggacttcgagaaggtggtggcctggaacccccaccccgagatgctgcccaagctgggcgccgtggccgaggagctgggcctgcccttcgaggccgtgacccaggagcagctgggcgcccaggccgacgtgatcatcaccatcaccagcgccttcgagcccctgctgatgaaggactggatcaagcccggcacccacatcgcctgcatgggcaccgacaccaagggcaagcaggaggtggacgccgccctggtggccgccgccaccgtgttcaccgacgaggtggcccagagcatcagcatcggcgaggcccagcacgccatcgccgagggcttcctgaccgaggacaggatcacccccatcggcgccgtgatcaacggcgcccaccccggcaggagcagcgacgacgagatcaccctgttcgacggcaccggcgtgggcctgcaggacctggccgtggccagcgtggccgccaggctggccgaggaggagggcagcgcccagagggtgagcctg

SEQ ID NO: 133 - DNA, 960 bp, Paracoccus denitrificans DSM 15418; identical to SEQ ID NO: 4

SEQ ID NO: 134 - DNA, 984 bp, Ruegeria halocynthiae MOLA R1/13b
atgaacacccagaccgacggcctgctgatcgtgggcgaggacctgtgcgagcagctggtgggcaggagccaggccttcgacgccgtgcagagcgtgttcgccgccatggccagcggcggcgccaggaacttccccgtgatcagggaggccctgggctacgccgacgccctgtacggcttcaagagcggcttcgacagggacggccaggtgctgggcgtgaagagcggcggctactggcccggcaacgccgacaagggcctgaccaaccaccagagcaccgtgttcctgttcgaccccgacaccggccagctgagcgccctggtgggcggcaactacctgaccgccgtgaggaccgccgccagcagcgccgtgagcatcgcccagctggccaggaaggacgccaaggtgctgggcatggtgggcgccggccaccagagcgccttccagctgagggccgccgccgagcagagggacttcgagaaggtggtggcctggaacccccaccccgacatgctgcccaggctggccgccgtggccgacgagatcggcctggagttcgaggccgtgagccagcaggagctgggcgcccaggccgacgtgatcatcaccatcaccagcgccttcgagcccctgctgatgaaggactggatcaagcccggcacccacctggcctgcatgggcaccgacaccaagggcaagatggaggtggaccccgagctggtgaccagcgccaccgtgttcaccgacgaggtggcccagagcctgaccatcggcgaggcccagcacgccgccggcaccggcgccctgaccgagagcgccatcacccccatcggcgccgtgatcaacggcgaccaccccggcaggaccggcgccgacgagatcaccctgttcgacggcaccggcgtgggcctgcaggacctggccgtggccagcgtggccgccaggctggccgacgaggccggcctggcccagagggtggccctg

SEQ ID NO: 135 - DNA, 963 bp, Paracoccus denitrificans DSM 413
atgctcgtcgtcgccgaaaaggaaatcgcgggtctgatgacccccgaggcggccttcgaggccatcgaggcggtcttcgcctcgatggcccggcgcaaggcatacaattttcccgtggtgcgcgaggccatcggccatgaggacgcgctctacggcttcaagggcggcttcgacgcctcggcgctggtgctggggctgaaggccggcggctactggcccaacaaccagaagcacaacctgatcaaccaccagtccaccgtgttcctgttcgacccggataccggccgggtctcggcggcggtaggcggcaacctgctgacggcgctgcgcaccgcggcggcctcggcggtgtcgatcaagtatctggcgcccaagggcgccaaggtgctgggcatgatcggcgccggccaccagtccgcgttccagatgcgggcggcggccaatgtgcatcggttcgaaaaggtcatcggctggaacccgcatcccgagatgctgtcgcgccttgccgataccgcggccgagctgggcctgcccttcgaggcggtcgaactggaccggcttggggccgaggccgacgtgatcgtctcgatcacctcgtccttctcgcctctgctgatgaacgagcatgtcaagggcccgacgcatatcgcggccatgggcaccgacaccaagggcaagcaagagctggatccggcgctggtcgcgcgcgcacggatcttcaccgacgaggtcgcgcagtcggtcagcatcggcgaatgccagcacgccatcgcggcgggtctgatccgcgaggatcaggtcggcgagcttggcgcggtggtcgcgggcgacgacccgggccgcggggatgccgaggtcacgatcttcgacggcaccggcgtcgggttgcaggacctggcggtcgcgcaagcggtcgtcgaactcgccaaacacaagggggtggcgcaagaggtcgagatctga

SEQ ID NO: 136 - DNA, 963 bp, Roseivivax isoporae LMG 25204
atgatcatcgtgcccgagagggagatcgccgccctgatgaccagggaggccgcctacgacgccgtggagaccgtgttcgccgccatggccgccgaggacgcctacaacttccccgtggtgagggaggccatcggccacgaggacgccctgtacggcttcaagggcggcttcgacagggccggcaaggtgctgggcctgaaggccggcggctactggcccaacaacctggagaggaggggcatcatcaaccaccagagcaccgtgttcctgttcgaccccgacaccggcagggcccacgccatggtgggcggcaacctgctgaccgccctgaggaccgccgccgccagcagcgtgagcatcaaccacctggccagggccgacgccagggtgatcggcatggtgggcgccggccaccaggccaccttccagctgagggccgccctggcccagaggcccttcgagaaggtgatcggctggaacctgcaccccgagatgctgcccaacctggagaaggtggccgacgaggccggcctgcccttcgaggccgtggacctgcccggcctgaccgaggccgacgtgatcgtgaccatcaccagcagcttcgcccccagcctgatggccgcccacgtggcccccggcacccacctggcctgcatgggcaccgacaccaagggcaagcaggaggtggaggccgccctgctggccagggccaccgtgttcaccgacgaggtggcccagagcgtggccatcggcgaggcccagcacgccgtggcccagggcctgatcgccgagggcgacgtgacccccatcggcgccgtgatcaacggcacccaccccggcaggaggagcgacgaggagatcaccctgttcgacggcaccggcgtgggcctgcaggacctggccgtggccgccagggtggtggagctggccgtggaggccggcgtggccgtggaggtggacttc

SEQ ID NO: 137 - DNA, 963 bp, Citreicella thiooxidans DSM 10146
atgctgatcgtgcccgagagggagatcggcgccctgatgaccagggccagcgccttcgaggccgtggagaaggtgttcgccgccatggccagcggcgaggcctacaacttccccgtgatcagggaggccatcggccacgaggacgccctgtacggcttcaagggcggcttcgacagggccggcctgaccctgggcctgaaggccggcggctactggcccaacaacctggagaagttcagggtgatcaaccaccagagcaccgtgttcctgttcgaccccgacaccggcaaggtggccgccatggtgggcggcaacctgctgaccgccctgaggaccgccgccgccagcagcgtgagcatcgcccacctggccaggagggacgccaaggtgatgggcatggtgggcgccggccaccaggccaccttccagctgagggccgccctggagcagaggcccttcgagaaggtgatcggctggaacctgcaccccgagatgctgcccaacatcgagaccgtggccgacgaggccggcctgcccttcgaggccgtggccctggagggcatgagggaggccgacgtgatcgtgagcatcaccagcagcttcgcccccagcctgatggccgcccacgtgagccccggcacccacctggcctgcatgggcaccgacaccaggggcaagcaggaggtggaggccgccctgctggccgtggccaccgtgttcaccgacgaggtggcccagagcgtgagcatcggcgaggcccagcacgccgtggccgagggcctgatcagcgagagcgacgtgcaccagatcggcgccgtgatcaacggcagccaccccggcaggaggagcgacgaggagatcaccctgttcgacggcaccggcgtgggcctgcaggacctggccgtggccgccgccgtggtggacctggccgtggagaagggcatcgccatcgaggtggacgtg

SEQ ID NO: 138 - DNA, 963 bp, Citreicella thiooxidans DSM 10146
atgctgatcgtgcccgagagggagatcgccgacctgatgaccagggaggccgccttcagcgccgtggagcaggtgttcgccagcatggccgccggcgacgcctacaacttccccgtggtgagggaggccatcggccacgaggacgccctgtacggcttcaagggcggcttcgacagggccggcctgaccctgggcctgaaggccggcggctactggccccacaacctggagaagaggggcatgatcaaccaccagagcaccgtgttcctgttcgaccccgacaccggcaaggccaaggccatggtgggcggcaacctgctgaccgccctgaggaccgccgccgccagcagcgtgagcatcaggcacctggccagggaggacgccaaggtgatcggcatggtgggcgccggccaccaggccaccttccagctgagggccgccctggagcagagggacttcgacaaggtgatcggctggaacctgcaccccgagatgctgcccaacctggagaaggtggccgccgaggccggcctgcccttcgaggccgtggagctggagggcatgagggccgccgacgtgatcatcagcatcaccagcagcttcgacgccatcctgatggaggagcacgtggcccccggcacccacatcgcctgcatgggcaccgacaccaagggcaagcaggaggtggcccccgccctgctggccaaggccgccgtgttcaccgacgaggtgagccagagcgtgagcatcggcgaggcccagcacgccgtggcccagggcctgatcagggaggccgacatcgcccagctgggcgccgtgatcaacggcgcccaccccggcaggaggagcgccgaggagatcaccctgttcgacggcaccggcgtgggcctgcaggacctggccgtggccgccgccgtggtggacctggccgtggagaagggcatcgccatcgaggtggacttc

SEQ ID NO: 139 - DNA, 963 bp, Antarctobacter heliothermus DSM 11445
atgctgatcgtgcccgagagggagatcgccaacctgatgaccagggaggccgccttcgacgccgtggagaaggtgttcgccgccatggccagcggcgacgcctacaacttccccgtggtgagggaggccatcggccacgaggacgccctgtacggcttcaagggcggcttcgacagggccggcctgaccctgggcctgaaggccggcggctactggcccaacaacctggagaagaggggcctgatcaaccaccagagcaccgtgttcctgttcgaccccgacaccggcatggtgaaggccatggtgggcggcaacctgctgaccgccctgaggaccgccgccgccagcagcgtgagcatcaagcacctggccaggaaggacgccaaggtgctgggcatgatcggcgccggccaccaggccaccttccagctgagggccgccctggagcagaggagcttcgacaaggtgatcggctggaactaccaccccgagatgctgcccaacatcgagaaggtggccagcgaggccggcgtgcccttcgaggccgtggacctgcccggcatgagggccgccgacgtgatcatcagcatcaccagcgccttcggccccagcctgatggccgaccacgtgagccccggcacccacgtggcctgcatgggcaccgacaccaagggcaagcaggaggtggaggccgccctgctggccagggccgccgtgttcaccgacgaggtggcccagagcgtgagcatcggcgaggcccagcacgccgtggcccagggcctgatccaggacagcgacatcgcccagctgggcgccgtgatcaacggcagccaccccggcaggatcagcgacgaccagatcaccctgttcgacggcaccggcgtgggcctgcaggacctggccgtggccgccgccgtggtggacctggccgtggcccagggcatcgccatcgaggtggacttc

SEQ ID NO: 140 - DNA, 963 bp, Nitratireductor sp. ZZ-1
atgcacatcgtgagcgaggccacctgcagggagatcatgggcagggacgacgccttcgccgccgtggaggccatcttcagcgccatggccaggggcgacgcctacaacttccccgtgatcagggaggccatcggccacgccgacgccctgtacggcttcaagagcggcttcgacagggccggcatggtgctgggcctgaagagcggcggctactggcccggcaacgagaagaagggcctgaccaaccaccagagcaccgtgttcctgttcgaccccgacagcggcaggcccatggccatggtgggcggcaaccacctgaccgccctgaggaccgccgccgccagcgccgtgagcatcaagcacctggccaggagggacgccagggtgctgggcatggtgggcgccggcttccagagcgccttccagatgagggccgccgtggcccagagggacttcgacaaggtggtgggctggaacctgcaccccgagatgctgggcaggctggaggccaccgccgccgagctgggcctgcccttcgaggccgtggacctggacaggctgggcgccgaggccgacgtgatcatcaccatcaccagcagcttcgcccccatcctgagcctggcccaggtgaggcccggcacccacctggcctgcatgggcaccgacaccaagggcaagcaggaggtggacgccgccctggtggccgccgccaccctgttcaccgacgaggtggcccaggccgccgccatcggcgagtgccagcacgccgtggccgccggcctggtggacgccgccgccatcacccccatcggcgccgtgatcgacggccagcaccccggcaggagcagccccgacgagatcaccctgttcgacggcaccggcgtgggcctgcaggacctggccatcgccagcgtggccgtggccaaggccatcgacaagggcatggcccagagcgtggccgtg

SEQ ID NO: 141 - DNA, 963 bp, Rhizobium sp. CNPSO 671
atgatcatcgtgcccgagagggccatcgccgacctgatcggcagcgccgagtgcttcaccgccgtggagcacgtgttcgccgccatggccaggaagagcgcctacaacttccccgtgatcagggaggccatcggctacgccgacgccctgtacggcttcaagagcggcttcgacagggagagcctgagcctgggcctgaagagcggcggcttctggcccaagaacgccgagagcggcctgaccaaccaccagagcaccgtgttcctgttcgacgccgacaccggcaggtgcagggccgtggtgggcggcaacctgctgaccgccctgaggaccgccgccgccagcgccatcagcatcaagtacctggccagggaggacgccaagatcctgggcatcatcggcgccggccaccagagcaccttccagctgagggccgccgtgcagcagaggaacttcgagaaggtggtggcctggaactaccaccccgagatgctgaccaggctggaggaggtggccagggagatcggcctgcccttcgaggccgtggacctggacaggctgggcgccgaggccgacgtgatcatcagcatcaccagcagcttcagccccagcctgatggccagccaggtgaggcccggcacccacctggcctgcatgggcaccgacaccaagggcaagcaggaggtggacgccaagctggtggccgccagcagcatcttcaccgacgaggtggcccaggccatcaccatcggcgagtgccagcacgccatcgccgacggcatgatcgccgccgaggacatcctggagatcggcgccgtgatcaccggcgacgtgaagggcaggaggagcgccgacgacatcaccctgttcgacggcaccggcgtgggcctgcaggacctggccgtggccagcgccgtggtggacctggccgtgagcaagggcgtggccatcgaggtggacttc

SEQ ID NO: 142 - DNA, 981 bp, Pseudomonas stutzeri NP_8HO
atgcagacccagagccccctgctgatcgtgcccgagcacctgatcgccgacctgatcagcgcccaggactgcttcgccgccgtggagcaggtgttcgccgccatggccagggacaccgcctacaacttccccgtgatcagggaggccatcggccacgccaacgccctgtacggcttcaagagcggcttcgacagggagagcctggccctgggcctgaagagcggcggcttctggcccaggaacgccgacaggggcctgaccaaccaccagagcaccatcttcctgttcgacgccgacaccggcaggtgcagggccgtggtgggcggcaacctgctgaccgccctgaggaccgccgccgccagcgccgtgagcatcaggcacctggccaggcccgacgccagggtgctgggcatgatcggcgccggccaccagagcaccttccagctgagggccgccctggaccagagggacttcgacagggtggtgggctggaacctgaaccccgccgacctggacaggctggccaaggtggccgacgagaggggcatccccttccaggccgtggacctggaccagctgggcgcccaggccgacgtgatcatcaccatcaccagcagcttcgcccccatcctgcaggccgcccaggtgaggcccggcacccacctggcctgcatgggcaccgacaccaagggcaagcaggaggtggaggccgccctgctgggcaaggccagcgtgttcaccgacgaggtggcccagagcgtgaccatcggcgaggcccagcacgccgtggcccagggcctgatcgcccccgacgacatcacccagatcggcgccgtgatcaacggcgacaggcccggcagggtgagcgacgaccagatcaccctgttcgacggcaccggcgtgggcctgcaggacctggccgtggccagcgccgccgtggacctggccgtggagaggggcatcgccatcgccgtgcagatc

SEQ ID NO: 143 - DNA, 963 bp, Ruegeria sp. ANG-R
atgatcatcgtgcccgagaaggagatcgccaccctgctgggcaggaccgagagctacgacgccgtggagcaggtgttcgccgccatggccgccggcgacgcctacaacttccccgtggtgagggaggccatcggccacgccaacgccctgtacggcttcaagggcggcttcgacagggccggcatgaccctgggcctgaaggccggcggctactggcccaacaacctggagacccacggcctgatcaaccaccagagcaccgtgttcctgttcgaccccgacaccggcagggtgagggccgtggtgggcggcaacctgctgaccgccctgaggaccgccgccgccagcagcgtgagcatcaaccacctggccaggaaggacgccaaggtgatcggcatggtgggcgccggccaccaggccacctaccagctgagggccgccctggagcagaggagcttcgagaaggtgatcggctggaacctgcaccccgagatgctgcccaacatcgccaacatcgccagcgaggccggcctgaggttcgaggccgtggagctgcccggcatggtggaggccgacgtgatcatcaccatcaccagcagcttcgcccccatcctgatgagcgaccacgtgagcaacggcacccacgtggcctgcatgggcaccgacaccgtgggcaagcaggaggtgggcgtggacctgatcaccagggccaccgtgttcaccgacgaggtggcccagagcatcaccctgggcgagtgccagcacgtggtggccgagggcagcaagaccgaggccgacatcaggcagatcggcgaggtgatcaacggcacccaccccggcaggcagaccgacgaggaggtgaccctgttcgacggcaccggcgtgggcctgcaggacctggccgtggccggcgccgtggtggacctggccgtggagaggggcatcgccatcgaggtggacttc

SEQ ID NO: 144 - DNA, 990 bp, Mameliella alba CGMCC 1.7290; identical to SEQ ID NO: 132

SEQ ID NO: 145 - DNA, 963 bp, Pseudorhodobacter antarcticus CGMCC 1.10836
atgtggatcgtgcccgaggccaagatcgccggcctgatggacagggccacctgcttcgccgccatcgagggcgtgttcggcgccatggccaggggcgacgcctacaacttccccgtgatcagggaggccatcggccacgccgacgccctgtacggcttcaagagcggcttcgacagggccggcctggccctgggcctgaagagcggcggctactggcccggcaacgaggccaagggcctgaccaaccaccagagcaccgtggtgctgttcgaccccgacaccggcagggtgaaggccctggtgggcggcaacctgctgaccgccctgaggaccgccgccgccagcgccgtgagcatcaagcacctggccaggcccgacgccaaggtgctgggcatggtgggcgccggccaccagagcgccttccagatgagggccgccgtggagcagagggccttcgagaaggtggtgggctggaacttccaccccgagatgctggacaggctggccggcgtggccgccgagctgggcctgcccttcgaggccgtgagcctggacgagctgggcgcccagagcgacgtgatcatcaccatcaccagcagccacaagcccatcctgaggagcgcccaggtgaaggccggcacccacatcgcctgcatgggcaccgacaccaagggcaagcaggaggtggacgacctgctggtggccagggccaccgtgttcaccgacgaggtggcccaggccatcagcatcggcgagtgccagcacgccatcgccagcggcctgatggccgaggccgagatcgccgagctgggcgccgtgatcaacggcagccacaagggcaggaccagcgccgaggaggtgaccctgttcgacggcaccggcgtgggcctgcaggacctggccgtggccgccgccgtggtggagctggccatcgccaagggcatcgccatcgaggtggacttc

SEQ ID NO: 146 - DNA, 963 bp, Loktanella sp. DSM 29012
atgctgatcgtgcccgagagggagatcagcaacctgatgaccagggacgccgccttcgaggccgtggagaaggccttcgccgccatggccagcgaggacgcctacaacttccccgtgatcagggaggccatcggccacgaggacgccctgtacggcttcaagggcggcttcgacagggccggcctgaccctgggcctgaaggccggcggctactggccccacaacctggagaagaggggcgagatcaaccaccagagcaccgtgttcctgttcgaccccgacaccggcaaggccaaggccatggtgggcggcaacctgctgaccgccctgaggaccgccgccgccagcagcgtgagcatcaagcacctggccaggaaggacgccaaggtgctgggcatgatcggcgccggccaccaggccaccttccagctgagggccgccctggagacccacaggttcaagaaggtgatcggctggaacttccaccccgacatgctgcccaacatcgagaaggtggccaacgaggccggcgtgcccttcgaggccgtggacctgcccagcatgagggacgccgacgtgatcatcagcatcaccagcgccttcgcccccagcctgatggccgaccacgtgagccccggcacccacgtggcctgcatgggcaccgacaccaagggcaagcaggaggtggaggccgccctgctggccagggccagcgtgttcaccgacgaggtggcccagagcatcagcatcggcgaggcccagcacgccatcgccgagggcctgatcaaggagagcgacgtggcccagctgggcgccgtgatcaacggcacccacaagggcagggccagcgacgacgagatcaccctgttcgacggcaccggcgtgggcctgcaggacctggccgtggccgccagcgtggtggacctggccgtggccaagggcatcgccatcgaggtggacttc

SEQ ID NO: 147 - DNA, 960 bp, Paracoccus thiocyanatus ATCC 700171
atgctggtggtgcccgagaagcagatcgccggcctgatgacccccgaggccgccttcgaggccatcgaggccgtgttcgccagcatggccaggaggaaggccaggaacttccccgtggtgagggaggccatcggccacgaggacgccctgtacggcttcaagggcggcttcgacggcgtggccctggtgctgggcctgaaggccggcggctactggcccctgaaccagaagcacggcctgatcaaccaccagagcaccgtgttcctgttcgaccccgacaccggcagggtggccgccgccgtgggcggcaacctgctgaccgccctgaggaccgccgccgccagcgccgtgagcatcaagtacctggcccccaagggcgccaaggtgctgggcatgatcggcgccggccaccagagcaccttccagatgagggccgccgccaacgtgcacaggttcgagaaggtgatcggctggaacccccaccccgagatgctgagcaggctggccgacaccgccaccgagctgggcctgcccttcgaggccgtggagctggacaggctgggcaccgaggccgacgtgatcatcagcatcaccagcagcttcagcgccctgctgatggaccagcacgtgaagggccccacccacatcgccgccatgggcaccgacaccaagggcaagcaggagctggaccccgccctggtggccagggccaggatctacaccgacgagatcgcccagagcgtgagcatcggcgagtgccagcacgccatcgccgccggcctgatcgcccaggaggccatcagggagctgggcgccgtggtggccggcaggggccccggcagggacggcgccgaggtgaccctgttcgacggcaccggcgtgggcctgcaggacctggccgtggccgccgccgtggtggagctggccaagcacaagggcgtggcccaggaggtggagatc

SEQ ID NO: 148 - DNA, 963 bp, Rhodovulum sulfidophilum TUT; identical to SEQ ID NO: 64

SEQ ID NO: 149 - DNA, 963 bp, Roseovarius sediminilitoris DSM 29439
atgttcatcgtgcccgagaaggagatcgccgccctggtgaccaggaaggacaacttcgacgccgtggagcaggtgttcgccagcatggccggcggcagcgcctacaacttccccgtgatcagggaggccatcggccacgccgacgccctgtacggcttcaagagcggcttcgacagggccgccctgaacctgggcctgaagagcggcggctactggcccggcaacgccgagaagggcctgaccaaccaccagagcaccgtgttcctgttcgacgccgacaccggcaagtgcagggccgtggtgggcggcaacctgctgaccgccctgaggaccgccgccgccgccgccgtgagcgtggcccacctggccaggaaggacagcaaggtgctgggcatgatcggcgccggccaccaggccaccttccagctgcaggccgtggccgagcagaggaacttcgagaaggtggtggcctggaacaggaccagcgagaagctggccagcctgcagaacgtggccgacgacctgggcctgcccttcgagagcgtgagcctggacgagctgggcgcccaggccgacgtgatcgtgaccatcgtgagcagccaggccgccatcctgaacgacgcccaggtgaagcccggcacccacatcgcctgcatgggcaccgacaccaagggcaagcaggaggtggacgccaacctggtggccagggccaccgtgttcaccgacgagatcgcccagagcatcagcatcggcgaggcccagcacgccatcgccgacggcagcctgaagcaggccgacatcagcgagatcggcgccgtgatcaacggcgaccaccccggcaggaccagcgacgacgaggtgaccctgttcgacggcaccggcgtgggcctgcaggacctggccgtggccagcaaggtggtggacctggccatcgagaagggcatcgccatcgaggtggacttc

SEQ ID NO: 150 - DNA, 963 bp, Leisingera sp. ANG-M1
atgtacatcgtgcccgagaaggagatcgccggcctgatgaccagggaggccgccttcgacgccgtggagaaggtgttcgccgccatggccagcggcgacgcctacaacttccccgtggtgagggaggccatcggccacgaggacgccctgtacggcttcaagggcggcttcgacagggccggcctgaccctgggcctgaaggccggcggctactggcccaacaacctggagaagaggggcctgatcaaccaccagagcaccgtgttcctgttcgaccccgacaccggcaaggccaaggccatggtgggcggcaacctgctgaccgccctgaggaccgccgccgccagcagcgtgagcatcaagcacctggccaggaaggacgccaaggtgatcggcatgatcggcgccggccaccaggccaagttccagctgagggccgccctggagcagaggcagttcgagaaggtgatcggctggaacctgcaccccgacatgctgcccaacctgcaggaggtggccgacgaggccggcctgcccttcgaggccgtggagctggacggcatgagggaggccgacgtgatcatcagcatcaccagcagcttcgacgccatcctgaacaccgcccaggtgagccccggcacccacatcgcctgcatgggcaccgacaccaagggcaagcaggaggtggacccccagctgctggtggccgccgacgtgttcaccgacgaggtggcccagagcatcagcatcggcgagacccagcacgccgtggcccagggcctgatccaggaggccgacgtggcccagatcggcgccgtgatcaacggcaccaaccccggcaggaccagcggcgaccagatcaccctgttcgacggcaccggcgtgggcctgcaggacctggccgtggccgccagcgtggtggacctggccgtggagcagggcatcgccatcgaggtggacttc

SEQ ID NO: 151 - DNA, 999 bp, Roseovarius azorensis DSM 100674
atgatgaacacccacgccgaggccaccgccgacggcttcgtgatcgtgggcgaggacatctgcgagaaggtgatcagcagggccgacgccttcgacgccgtggaggccgtgttcgccgccatggccaggggcgacgcctacaacttccccgtggtgagggaggccatcggccacgccgacgccctgtacggcttcaagggcggcttcgacaggaccggcctgagcctgggcctgaaggccggcggctactggcccggcaacatggccaggggcctgaccaaccaccagagcaccgtgttcctgttcgaccccgacaccggcaggctgagcgccctggtgggcggcaactacctgaccgccctgaggaccgccgccagcagcagcgtgagcatcgcccacctggccagggaggacagcaaggtgctgggcatggtgggcgccggccaccagagcaccttccagctgagggccgccgtggagcagagggacttcgagaaggtggtggcctggaacccccaccccgagatgctgcccaggctgggcgccgtggccgaggagctgggcctggccttcgaggccgtgagccccgaggacctgggcgcccaggccgacgtgatcatcaccatcaccagcgccttcgagcccctgatcatggccgactggatcaggcccggcacccacatcgcctgcatgggcaccgacaccaagggcaagcaggaggtggaccccgccctgttcagcagggccaccgtgttcgccgacgaggtggcccagagcatcagcatcggcgaggcccagcacgccgtgggccagggcgtgatcgccgagagcgacatcacccccgtgggcgccgtgatcaacggcacccacggcggcaggggcagcgacgaggagatcaccctgttcgacggcaccggcgtgggcctgcaggacctggccgtggccgccgtggccgccaggctggccagggagcagggcctggtgacccccgtgaccttc

SEQ ID NO: 152 - DNA, 963 bp, Sulfitobacter pseudonitzschiae DSM 26824
atgctgatcgtgcccgagagggagatcgccaacctgatgaccagggccgccgccttcgacgccgtggagcaggtgttcgccgccatggccgccggcgacgcctacaacttccccgtggtgagggaggccatcggccacgaggacgccctgtacggcttcaagggcggcttcgacagggccggcctgaccctgggcctgaaggccggcggctactggcccaacaacctggagaagaggaacctgatcaaccaccagagcaccgtgttcctgttcgaccccgacaccggcagggccagggccatggtgggcggcaacctgctgaccgccctgaggaccgccgccgccagcagcgtgagcatcaagcacctggccaggaaggacgccagggtgatcggcatggtgggcgccggccaccaggccaccttccagctgagggccgccctggagcagagggacttcgacaaggtgatcggctggaactaccaccccgagatgctgcccaacatcgagaagatcgccagggaggccggcgtgcccttccaggccgtggacctgcccggcatggtggaggccgacgtgatcatcagcatcaccagcgccttcagccccagcctgatggccgaccacgtggcccccggctgccacctggcctgcatgggcaccgacaccaagggcaagcaggaggtggaggccgccctgctggccagggccaccgtgttcaccgacgaggtggcccagagcgtgagcatcggcgaggcccagcacgccgtggccgagggcctgatcgccgagagcgacgtgcaccagctgggcgccgtgatcaacggcacccacgccggcagggtgagcgacgaccagatcaccctgttcgacggcaccggcgtgggcctgcaggacctggccgtggccgccgccgtggtggacctggccgtggcccagggcatcgccatcgaggtggacttc

SEQ ID NO: 153 - DNA, 963 bp, Ruegeria sp. CECT 5091
atgatcatcgtgcccgagaaggagatcggcgccctgctgggcaggaaggagagctacagcgccgtggagcaggtgttcgccgccatggccagcggcgacgcctacaacttccccgtggtgagggaggccatcggccacgccgacgccctgtacggcttcaagggcggcttcgacagggccggcatgaccctgggcctgaaggccggcggctactggcccaacaacctggagacccacggcctgatcaaccaccagagcaccgtgttcctgttcgaccccgacaccggcagggtgaaggccatcgtgggcggcaacctgctgaccgccctgaggaccgccgccgccagcagcgtgagcatcaaccacctggccaggaaggacgccaaggtgatcggcatggtgggcgccggccaccaggccaccttccagctgagggccgccctggagcagagggacttcgagaaggtgatcggctggaacctgcaccccgagatgctgcccaacatcgagaaggtggccaacgaggccggcctgcccttcgaggccgtggagctgcccggcctgaccgaggccgacgtgatcgtgaccatcaccagcagcttcgagcccaccctgctgagcgagcacgtgagcgacggcacccacgtggcctgcatgggcaccgacaccgtgggcaagcaggaggtgggcgccgacctggtgatcagggccagcgtgttcaccgacgaggtggcccaggccatcaccctgggcgagagccagcacgccgtggccgccggcgacaaggccgaggccgacatccaccagatcggcgccgtgatcaacggcacccacgccggcaggaacagcgacgacgaggtgaccctgttcgacggcaccggcgtgggcctgcaggacctggccgtggccagcgccgtggtggacctggccgtgaagcagggcatcgccatcgaggtggacttc

SEQ ID NO: 154 - DNA, 966 bp, Pseudoruegeria haliotis DSM 29328
atgctgatcgtgcccgagagggagatcggcaacctgatgaccagggccgccgccttcgacgccgtggagggcgtgttcgccgccatggccagcaagaacgcctacaacttccccgtggtgagggaggccatcggctacgaggacgccctgtacggcttcaagggcggcttcgacagggccggcaagaccctgggcctgaaggccggcggctactggcccaacaacctggagaagttcgacctgatcaaccaccagagcaccgtgttcctgttcgaccccgacaccggcagggtgaaggccatcgtgggcggcaacctgctgaccgccctgaggaccgccgccgccagcagcgtgagcatcaagcacctggccagggaggacgccaaggtgctgggcatgatcggcgccggccaccaggccaccttccagctgagggccgccctggagcagaggagcttcgagaaggtggtgggctggaactaccaccccgagatgctgcccaacatcgagaaggtggccgccgaggccggcctgcccttcgaggccgcccagctggacaggctgggccaggaggccgacgtggtgatcagcatcaccagcgccttcgcccccagcctgatggccgaccacgtgagccccggcacccacatcgcctgcatgggcaccgacaccaagggcaagcaggagctggacgccgccctgctgcccagggccaccgtgttcaccgacgaggtggcccagagcgtgagcatcggcgaggcccagcacgccgtggcccagggcctgatcgcccagagcgacgtgcagcagatcggcgccgtgatcaacggcacccaccccggcaggaccagcgccgaggagatcaccctgttcgacggcaccggcgtgggcctgcaggacctggccgtggccgccagcgtggtggacctggccgtgcagcagggcatcgccatcgaggtggacttc

SEQ ID NO: 155 - DNA, 960 bp, Psychrobacter sp. ENNN9_III
atgagcgaggccaacagcgtgcacagcgacgagggcctgctgatcgtgagcgaggacgcctgcaagagcgtgatcgacaggcccagcgccttcaccgccgtggagaacgtgttcgccagcatgagcaggggcgacgcctacaacttccccgtgatcagggaggccatcggctacgccgacgccctgtacggcttcaagagcggcttcgacagggccggcaagagcctgggcctgaagagcggcggctactggcccggcaacgccgacaagggcctgaccaaccaccagagcaccatcttcctgttcaaccccgacaacggcaagctgagggccctggtgggcggcaactacctgaccgccgtgaggaccgccgccgccagcgccgtgagcatcgcccacctggccaggaaggacagcaaggtgctgggcatggtgggcgccggccaccagagcaccttccagctgagggccgccctggagcagaggaacttcgagaaggtggtggcctggaacaacaacaaggacaggctgaagaacctgcaggccgtggccgaggagctgggcgtgcccttcgagagcgtggagagggagcagctgtgcagcgaggccgacgtgatcatcaccatcaccagcgccttcgagcccctgctgatgaaggagtggatcaagcccggcacccacatcgcctgcatgggcaccgacaccgtgggcaagcaggaggtggacgtgaacctgatcagcgccgccaccgtgttcaccgacgagatcgcccagagcatcagcctgggcgaggcccagcacgccatcaagagcagcgccatcaaggagagcgacatcaccaccctgggcgacgtgatcaacggcgagcaccccggcaggagcagcgacgacgagatcaccctgttcgacggcaccggcgtgggcctgcaggacctggccgtggccagcgccgccgccaag

SEQ ID NO: 156 - DNA, 951 bp, Pararhodobacter aggregans DSM 18938
atgctggtggtgcccgagaggctgatcgccggcctgatgggccccgacgaggccttcgaggccgtggccgaggtgttcaggcagaccgccggcggcgccgccaggaacttccccgtggtgagggaggccctgggcggcggcaggcagtacggcttcaagagcggcatgggccccggcgccctgggcgtgaaggccggcggctacttccccggcaacgccgccaggggcatcaccaaccaccagagcgtggtgaccctgttcgaccccgagaccggcaggcccgaggccatgatcggcggcaacctgctgaccgccctgaggaccgccgccgccgccgccgtgagcatcgacgccctggccaggcccggcgccagggtgctgggcatcgtgggcgccggccaccaggccgccttccagctgagggccgccgccagggtgaggaggttcgagagggtgatcgcctggaacaggacccccgagaggctggccggcctggccgccgtggccgaggagctgggcctgcccttcgaggccgtgcccctggccggcatgagggaggccgaggtgatcgtgaccatcaccagcagccccgcctacgccctggccgccgcccacgtgagccccggcacccacctggcctgcatgggcaccgacaccatcggcaagcaggaggtggagcccgccctgctgggcgccgccagggtgttcaccgacgagcccgcccagagcgtgaccctgggcgaggcccagcacgccgtggcccagggcctgctggaccccgccaggatcgtgcccctgggcgccgtgctgaccggcgaggcccccggcagggaggaccccgaccagatcaccctgtacgacggcaccggcgtgggcctgcaggacctggccgtggccgccagggtgctggccctggccaaggccaggggcctggccatccccgtggagatc

SEQ ID NO: 157 - DNA, 963 bp, Rhodovulum kholense DSM 19783
atgttcgtggtgcccgagagcgagatcgccggcctggtgagccccgcccagtgcttcgaggccgtggaggccgtgttcagcgccatggccagggacgaggcctacaacttccccgtgatcagggaggccatcggccacgccgacgccctgtacggcttcaagagcggcttcgacagggccggcaaggtgctgggcctgaagagcggcggctactggcccggcaacgtggagaagggcctgaccaaccaccagagcaccgtggtgctgttcgaccccgacaccggcaggcccgccgccctggtgggcggcaacctgctgaccgccctgaggaccgccgccgccagcgccgtgagcatcaggcacctggccaggtgcgacagcagggtgctgggcctgctgggcgccggccaccagagcgccttccagatgagggccgccgtggccgagaggcccttcgagaaggtgatcggctggaactaccaccccgagatgctgcccaggctggccgagaccgccgtggagctgggcctgcccttcgaggccgtgagcctggaggacctgggcgcccaggccgacgtgatcgtgaccatcagcagcagcgtggccgcccagctgctggacgcccacgtgaggcccggcacccacctggcctgcatgggcaccgacaccaggggcaagcaggagatcgacgccgccatcttcgccagggccagggtgttcaccgacgaggtggcccagagcgtggagatcggcgaggcccagcacgccgtggccgccggcctgatcggcgccggcgacatcgtgcagatcggcgccgtgatcaacggcaccgtgcccggcaggcagagcgaggacgacatcaccctgttcgacggcaccggcgtgggcctgcaggacctggccgtggccgccagggccgtggccgccgccagggccaagggcgtggccgtggaggtggacctg

SEQ ID NO: 158 - DNA, 963 bp, Rhizobium yanglingense LMG 19592
atgatcatcgtgcccgagagcgccatcggcgagctggtgagcctggaggactgcgtggacgccgtggagaaggtgttcgtgagcatggccgagaggagcgcccacaacttccccgtggtgagggaggccatcggctacgccgacgccctgttcggcttcaagagcggcttcgacaggaagggcctggccctgggcctgaaggccggcggcttctggcccaacaacgccgacaagggcctgaccaaccaccagagcaccgtgttcctgttcgaccccgagaccggcaggtgcagggccgtggtgggcggcaacctgctgaccgccctgaggaccgccgccgccagcgccgtgagcatcaagcacctggccaggaacgacgccaaggtgctgggcatggtgggcgccggccaccaggccagcttccagctgagggccgccgtgcagcagaggcagttcgagaaggtggtggcctggaactaccaccccgacatgctgcccaagctggccgccgtggccgaggagctgggcatccccttcgaggccgtgaacctggacaggctgggcgccgaggccgacgtgatcatcaccatcaccagcagcttccagcccatcctgaaggccagccagatcaagcccggcacccacctggcctgcatgggcaccgacaccaagggcaagcaggaggtggacgtggccctggtggccggcgccaccctgttcaccgacgagatcgcccaggccatcagcatcggcgagtgccagcacgccatcgcccagggcatgatcgcccccatcgacatcgccgagatcggcgccgtgatcaacggccagaagcccggcaggaccagccccgacgagatcaccctgttcgacggcaccggcgtgggcctgcaggacctggccgtggcccaggccgccgtgggcctggccctggccaggggcaccgccgtggaggtggacttc

SEQ ID NO: 159 - DNA, 963 bp, Labrenzia sp. C1B70; identical to SEQ ID NO: 118

SEQ ID NO: 160 - DNA, 960 bp, Starkeya novella DSM 506 chromosome
atgtacgtggtggccgagaaggacatcgccggcctgatgacccccgaggccgccttcgaggccatcgaggccgtgttcgccagcatggccaggaggcaggcctacaacttccccgtggtgagggaggccatcggccacgccgacgccctgtacggcttcaagggcggcttcgacggcgccggcctggccctgggcctgaaggccggcggctactggccccacaaccaggagaggggcctgatcaaccaccagagcaccgtgttcctgttcgaccccgacagcggcagggtgagcgccgccgtgggcggcaacctgctgaccgccctgaggaccgccgccgccagcgccgtgagcatcaagtacctggcccccaagggcgccaaggtgctgggcatgatcggcgccggccaccagagcgccttccagatgagggccgccgccagggtgcaccccttcgagaaggtgatcggctggaacccccaccccgagatgctgggcaggctgagcgacaccgccgccgagctgggcctgcccttcgaggccgtggagctggagaggctgggcgaggaggccgacgtgatcatcagcatcaccagcagcttcggccccctgctgatggacgaccacgtgaagggccccacccacatcgccgccatgggcaccgacaccaagggcaagcaggagctggaccccggcctggtggccagggccaggctgttcaccgacgagatcgcccagagcgtgagcatcggcgagtaccagcacgccgtggcccagggcctgatcacccaggacaggatcggcgagctgggcgccgtggtgaccggcgacgacgccggcaggggcgacgccgaggtgaccatcttcgacggcaccggcgtgggcctgcaggacctggccgtggccgccaaggtggtggagctggccaagcagaagggcatcgcccagcaggtggaggtg

SEQ ID NO: 161 - DNA, 963 bp, Ruegeria mobilis 45A6
atgtacatcgtgcccgagagggccatcgccgacctgatgaccagggacgccgccttcgacgccgtggagaaggtgttcgccgccatggccgccggcgacgcctacaacttccccgtggtgagggaggccatcggccacgaggacgccctgtacggcttcaagggcggcttcgacagggccggcctgagcctgggcctgaaggccggcggctactggcccaacaacctggagaagaggggcctgatcaaccaccagagcaccgtgttcctgttcgaccccgacaccggcaaggtgagggccatggtgggcggcaacctgctgaccgccctgaggaccgccgccgccagcagcgtgagcatcaagcacctggccagggaggacgccaaggtgatcggcatgatcggcgccggccaccaggccaagttccagctgagggccgccctggagcagagggacttcgacaaggtgatcggctggaacctgcaccccgagatgctgcccaacctggaggagatcgccaccgaggccggcctgcccttcgaggccgtggagctggacggcctgaaggaggccgacgtgatcatcagcatcaccagcagcttcgacgccatcctgaaggccgaccaggtgagccccggcacccacatcgcctgcatgggcaccgacaccaagggcaagcaggaggtggacccccagctgctggtgagggccaccgtgttcaccgacgaggtggcccagagcaccagcatcggcgaggcccagcacgccgtggcccagggcctgatcgccgaggccgacgtggcccagctgggcgccgtgatcaacggcgcccaccccggcaggagcagcgccgagcagatcaccctgttcgacggcaccggcgtgggcctgcaggacctggccgtggccgccagcgtggtggagctggtggtgaagaagggcatcgccatcgaggtggacttc

SEQ ID NO: 162 - DNA, 963 bp, Oceaniovalibus guishaninsula JLT2003
atgatcatcgtgcccgaggccgccatcgccaacctggtgacccccgaggccagcttcgccgccgtggagaaggtgttcgccagcatggccgccaagagcgcctacaacttccccgtgatcagggaggccatcggccacgccgacgccctgtacggcttcaagagcggcttcgacagggccgccctgaacctgggcctgaagagcggcggctactggcccggcaacgccgacaagggcctgaccaaccaccagagcaccgtgttcctgttcgacgccgacaccggcaggtgcagggccgtggtgggcggcaacctgctgaccgccctgaggaccgccgccgccgccgccgtgagcgtggcccacctggccaggagggacgccaaggtgctgggcatcgtgggcgccggccaccaggccgccttccagctgagggccgtggccgcccagaggcccttcgagagggtggtggcctggaacaggagccccgagaagctgagcggcctgagggaggtggccgagggcctgggcctggccttcgagaccgtgagcctggacgacctgggcgcccaggccgacgtgatcgtgaccatcaccagcagcttcgacgccatcctgggcgccgaccaggtgaggcccggcacccacctggcctgcatgggcaccgacaccaagggcaagcaggaggtggacgccgccctgctgggcagggccaccgtgttcaccgacgagatcgcccagagcaccaccatcggcgaggcccagcacgccatcgccgacctgaccctgaggctggaggacatcgtggagctgggcgccgtgatcaacggcgaccaccccggcaggagcagcgacgacgagatcaccctgttcgacggcaccggcgtgggcctgcaggacctggccgtggccgccgccgtggtggacctggccgtggagaggggcgtggccaccgaggtggagttc

SEQ ID NO: 163 - DNA, 963 bp, Loktanella vestfoldensis DSM 16212
atgatcatcgtgcccgagagggagatcgccggcctgctgggcagggccgacgcctacatggccgtggaggccgtgttcgccgccatggccagcggcgacgccaggaacttccccgtgatcagggaggccatcggccacgccgacgccctgtacggcttcaagagcggcttcgacagggccggcctggccctgggcctgaagagcggcggctactggcccggcaacgccgccaagggcctgaccaaccaccagagcagcgtgttcctgttcgacgccgacaccggcaagtgcagggccgtggtgggcggcaacctgctgaccgccctgaggaccgccgccgccgccgccgtgagcatcaaccacctggccagggtggacgccagggtgctgggcatcgtgggcgccggccaccagagcgtgttccagctgagggccgccctggagcagagggacttcaccagggtggtggcctggaacagggaccccgccaagctggccaggctgagcgacgtggccgccgagcacggcctgcccttcgccgccgtgagcctggccgagctgggcgccgccgccgacgtgatcatcaccatcgtgagcgcccacgagcccctgctgatggacgcccacatcaggcccggcacccacatcagctgcatgggcaccgacaccaagggcaagcaggagatcgacgccgccatcttcgccagggccagcgtgttcaccgacgagatcgcccagagcaccagcatcggcgaggcccagcacgccgtggccgccggcatcatcagcgccgacaggatcaccgccctgggcgccgtgatcaacggcacccaccagggcaggaccagcgccgacgagatcaccatcttcgacggcaccggcgtgggcctgcaggacctggccgtggccagcgccgtggtggacctggccgtgacccagggcgtggccaccatcgtggacttc

SEQ ID NO: 164 - DNA, 963 bp, Rhizobium etli bv. mimosae Mim1
atgatcatcgtgcccgagagcgccatcggcgagctggtgagcctggaggactgcgtggacgccgtggagaaggtgttcgtgagcatggccgagaggagcgcccacaacttccccgtggtgagggaggccatcggctaccaggacgccctgttcggcttcaagagcggcttcgacagggagggcctggccctgggcctgaaggccggcggcttctggcccaacaacgccgacaagaggctgaccaaccaccagagcaccgtgttcctgttcgaccccgagaccggcaggtgcagggccgtggtgggcggcaacctgctgaccgccctgaggaccgccgccgccagcgccgtgagcatcaagcacctggccaggagggacgccaaggtgctgggcatggtgggcgccggccaccaggccagcttccagctgagggccgccatgcagcagaggcccttcgagaaggtggtggcctggaactaccaccccgagatgctgcccaagctggccgccgtggcccaggagctggccgtgcccttcgaggccgtggacctggacaggctgggcggcgaggccgacgtgatcatcaccatcaccagcagcttccagcccatcctgaaggccctgcagatcaagcccggcacccacatggcctgcatgggcaccgacaccaagggcaagcaggaggtggacgccgccctggtggccgaggccaccctgttcaccgacgagatcgcccaggccatcagcatcggcgagtgccagcacgccgtggccaggggcatgatcgcccccatcgacatcgtggagatcggcgccgtgatcaacggccagcagcccggcaggaccagccccgaccagatcaccctgttcgacggcaccggcgtgggcctgcaggacctggccgtggcccaggccgccgtgggcctggccctggccaggggcatggccgtggaggtggacttc

SEQ ID NO: 165 - DNA, 963 bp, Methylobacterium komagatae DSM 19563
atgatcatcgtgcccgagaacaggatcgacggcctgctgaccgaggccgactgcttcaccgccgtggagaaggtgttcgccagcatggccaggaggaccgccggcaacttccccgtggtgagggaggccatcggccacgccgacgccctgtacggcttcaagagcggcttcgacagggagagcctggccctgggcctgaaggccggcggcttctggcccggcaacgccgccaagggcctgaccaaccaccagagcaccgtgttcctgttcgacgccgacaccggcaggtgcagggccgtggtgggcggcaacctgctgaccgccctgaggaccgccgccgccagcgccatcagcatcaagcacctggccaggaaggacgccagggtgctgggcatgatcggcgccggccaccagagcgccttccagctgagggccgccctggcccagaggcccttcgagagggtgctggcctggaacctgcaccccggcatgttcggcaggatggaggccgtggccagggagcacggcgtgcccttcgaggtggccgagctggacaggctgggcgccgaggccgacgccatcgtgaccatcaccagcagcttcgcccccatcctgaaggccagccacgtgaagcccggcacccacatcgcctgcatgggcaccgacaccaagggcaagcaggaggtggaggccgagctgctggccgccgccaccgtgttcaccgacgaggtggcccagagcgtgagcatcggcgaggcccagcacgccatcggcaggggcctgctgaccgagggcgccatcgtggagatcggcgccgtgatcaacggcgaccaccccggcaggaccagcgacgaggagatcaccctgttcgacggcaccggcgtgggcctgcaggacctggccgtggccagcgccgccgtggacctggccgtggccaagggcctggccgtggaggtggagttc

SEQ ID NO: 166 - DNA, 963 bp, Rhizobium tropici YR635
atgatcatcgtgcccgagaccgagatcgccggcctggtgacccccgccgactgcttcagggccgtggagggcgtgttcgccagcatggccgacaagagcgcctacaacttccccgtgatcagggaggccatcggccacgccgacgccctgtacggcttcaagagcggcttcgacaggaagggcctggccctgggcctgaaggccggcggcttctggcccaacaacgtgcacaggggcctgaccaaccaccagagcaccgtgttcctgttcgacgccgacaccggcaagtgcagggccgtggtgggcggcaacctgctgaccgccctgaggaccgccgccgccagcgccatcagcatcaagtacctggccaggaaggacgccaaggtgctgggcatgatcggcgccggccaccaggccaccttccagctgagggccgccctggcccagaggagcttcgagaggatcgtgggctggaacctgcaccccgacatgctgagcaggctggaggaggtggccaaggaggagggcctgcccttcgaggccgtggacctggacaggctgggcgccgaggccgacgtgatcatcagcatcaccagcagcttcgcccccatgctgaaggccagccaggtgagggccggcacccacctggcctgcatgggcaccgacaccaagggcaagcaggaggtggaggccgagatcctggccgccgccgccgtgttcaccgacgaggtggcccaggccgtgaccatcggcgagagccagcacgccatcgagaggggcctgatcagggaggaggccatcgtggagatcggcgccgtgatcaacggcacccaccccggcaggaccagcgccgaccagatcaccctgttcgacggcaccggcgtgggcctgcaggacctggccgtggccagcgccgccgtggagctggccctggccaagggcgtggccatcgaggtggacttc

SEQ ID NO: 167 - DNA, 963 bp, Aurantimonas altamirensis DSM 21988
atgatcatcgtgcccgagagggacatcgccggcctgatcggccccgccgactgcttcgtggccgtggagggcgtgttcgccgccatggccaggaggaccgccaggaacttccccgtggtgagggaggccctgggccacgccgacgccctgtacggcttcaagagcggcttcgacggcgagagcctggccctgggcctgaagagcggcggcttctggcccggcaacatggccaggggcctgaccaaccaccagagcgccgtgttcctgttcgacgccgacaccggccagtgcagggccatcgtgggcggcaacaggctgaccgccctgaggaccgccgccgccagcgccatcagcatcaagtacctggccaggcaggacgccaggaccctgggcatcatcggcgccggccaccagagcaccttccagctggaggccgccctggagcagagggccttcgagaagatcgtgggctggaacgtggagcccgagatgctgagcaagctggaggaggtggccgccaggaggggcctgcccttcgagagggtggacctggacggcctgggcgcccaggccgacgtgatcatcaccatcaccagcagcttcgcccccatcctgaaggtggcccaggtgaggcccggcacccacatcgcctgcatgggcaccgacaccgtgggcaagcaggaggtggaggccgagctggtggccagggccagcgtgttcaccgacgaggtggcccaggccgtgaccctgggcgagagccagcacgccgtggccgccggcctggtggacgccggcagcatcgtggagatcggccaggtggtgaccggcggccacgccggcaggaccacccccgaggagatcaccctgttcgacggcaccggcgtgggcctgcaggacctggccgtggccagcgccatcgtggacctggccgtgaggaagggcatcgccaccgaggtggagttc

SEQ ID NO: 168 - DNA, 963 bp, Sulfitobacter sp. MCCC 1A00686; identical to SEQ ID NO: 152

SEQ ID NO: 169 - DNA, 963 bp, Methylobacterium sp. 13MFTsu3.1M2
atgatcatcgtgcccgagcacgccatcgacggcctgctgaccgaggccgagtgcttcaccgccgtggagcaggtgttcgccagcatggccaggaggagggccggcaacttccccgtggtgagggaggccatcggccacgccgacgccctgtacggcttcaagagcggcttcgacagggacagcctggccctgggcctgaaggccggcggcttctggcccggcaacgccgccaagggcctgaccaaccaccagagcaccgtgttcctgttcgacgccgacaccggcaggtgcagggccgtggtgggcggcaacctgctgaccgccctgaggaccgccgccgcctgcgccatcagcgtgaggcacctggccaggaaggacgccagggtgctgggcatgatcggcgccggccaccagagcgccttccagctgagggccgccctggcccagaggcccttcgagggcgtgctggcctggaacctgcaccccggcatgttcggcaggatggaggccgtggccagggagcacggcgtgcccttcgaggccgtggacctggacaggctgggcagcgaggccgacgtggtggtgaccatcaccagcagcttcgcccccatcctgaaggccgcccaggtgaggcccggcacccacctggcctgcatgggcaccgacaccaggggcaagcaggaggtggaggccgagctgctggccggcgccaccgtgttcaccgacgaggtggcccagagcgtgagcatcggcgaggcccagcacgccgtggccaggggcctgctggccgccgacagcatcgtggagatcggcgccgtgatcaacggcgaccaccccggcagggtgagcgagagcgagatcaccctgttcgacggcaccggcgtgggcctgcaggacctggccgtggccgccgtggccgtggacagggccgtggccaagggcctggccaccgaggtggacgtg

SEQ ID NO: 170 - DNA, 963 bp, Methylobacterium sp. 275MFSha3.1
atgatcatcgtgcccgagcacgccatcgacggcctgctgaccgaggccgagtgcttcaccgccgtggagcaggtgttcgccagcatggccaggaggagggccggcaacttccccgtggtgagggaggccatcggccacgccgacgccctgtacggcttcaagagcggcttcgacagggacagcctggccctgggcctgaaggccggcggcttctggcccggcaacgccgccaagggcctgaccaaccaccagagcaccgtgttcctgttcgacgccgacaccggcaggtgcagggccgtggtgggcggcaacctgctgaccgccctgaggaccgccgccgcctgcgccatcagcgtgaggcacctggccaggaaggacgccagggtgctgggcatgatcggcgccggccaccagagcgccttccagctgagggccgccctggcccagaggcccttcgacagggtgctggcctggaacctgcaccccggcatgttcggcaggatggaggccgtggccagggagcacggcgtgcccttcgaggccgtggacctggacaggctgggcagcgaggccgacgtggtggtgaccatcaccagcagcttcgcccccatcctgaaggccgcccaggtgaggcccggcacccacctggcctgcatgggcaccgacaccaggggcaagcaggaggtggaggccgagctgctggccggcgccaccgtgttcaccgacgaggtggcccagagcgtgagcatcggcgaggcccagcacgccgtggccaggggcctgctggccgccgacgccatcgtggagatcggcgccgtgatcaacggcgaccaccccggcagggtgagcgagagcgagatcaccctgttcgacggcaccggcgtgggcctgcaggacctggccgtggccgccgtggccgtggacagggccgtggccaagggcctggccaccgaggtggacttc

SEQ ID NO: 171 - DNA, 960 bp, Paracoccus pantotrophus DSM 11073; identical to SEQ ID NO: 45

SEQ ID NO: 172 - DNA, 963 bp, Marinovum algicola DSM 10251
atgttcatcgtgcccgagagggacatcgccgacctgatgaccagggaggccgccttcgacgccgtggagaaggtgttcgccgccatggccagcggcgacgcctacaacttccccgtggtgagggaggccatcggccacgaggacgccctgtacggcttcaagggcggcttcgacagggccggcctgaccctgggcctgaaggccggcggctactggcccaacaacctggagaagaggggcatcatcaaccaccagagcaccgtgttcctgttcgaccccgacaccggcaaggccaaggccatggtgggcggcaacctgctgaccgccctgaggaccgccgccgccagcagcgtgagcatcaagcacctggccaggaaggacgccaaggtgatcggcatggtgggcgccggccaccaggccaagttccagctgagggccgccctggagcagagggacttcgagaaggtgatcggctggaacttccaccccgagatgctgcccaacctggaggaggtggccagcgaggccggcctgcccttcgaggccgtggccctggagggcctggccgaggccgacgtgatcatcagcatcaccagcagcttcgacgccatcctgcacgccgaccacgtggcccccggcacccacatcgcctgcatgggcaccgacaccaagggcaagcaggaggtggagaccgccctgctgggcaaggccaccgtgttcaccgacgaggtggcccagagcatcagcatcggcgaggcccagcacgccatcgagagccagatcctgagggccgaggacatcacccaggtgggcgccgtgatcaacggcacccaccccggcaggatcagcgacgacgagatcaccctgttcgacggcaccggcgtgggcctgcaggacctggccgtggccgccgccgtggtggacctggccgtggccaagggcctggccatcgaggtggacttc

SEQ ID NO: 173 - DNA, 960 bp, Paracoccus versutus DSM 582
atgctggtggtggccgagaaggagatcgccggcctgatgacccccgaggccgccttcgaggccatcgaggccatcttcgccagcatggccaggaggaaggcctacaacttccccgtggtgagggaggccatcggccacgaggacgccctgtacggcttcaagggcggcttcgacgccagcgccctggtgctgggcctgaaggccggcggctactggcccaacaaccagaagcacaacctgatcaaccaccagagcaccgtgttcctgttcgaccccgacaccggcagggtgaccgccgccgtgggcggcaacctgctgaccgccctgaggaccgccgccgccagcgccgtgagcatcaagtacctggcccccaagggcgccaaggtgctgggcatgatcggcgccggccaccagagcgccttccagatgagggccgccgccaacgtgcaccccttcgagaaggtgatcggctggaacccccaccccgagatgctgagcaggctggccgacaccgccgccgagctgggcctgcccttcgaggccgtggagctggacaggctgggcaccgaggccgacgtgatcatcagcatcaccagcagcttcagccccctgctgatggaccagcacgtgaagggccccacccacatcgccgccatgggcaccgacaccaagggcaagcaggagctggaccccgccctggtggccagggccaggatcttcaccgacgaggtggcccagagcgtgagcatcggcgagtgccagcacgccatcgccagcggcctgatcagggaggaccagatcggcgagctgggcgccgtggtggccggcgaccaccccggcagggtggacgccgaggtgaccctgttcgacggcaccggcgtgggcctgcaggacctggccgtggcccagaaggtgctggagatcgccaaggagaagggcctggcccaggaggtggagatc

SEQ ID NO: 174 - DNA, 963 bp, Thalassobius aestuarii DSM 15283
atgctgatcgtgcccgagagggacatcgccgacctgatgaccagggccgccgccttcgaggccgtggagcaggtgttcgccgccatggccagcaaggacgcctacaacttccccgtggtgagggaggccatcggccacgaggacgccctgtacggcttcaagggcggcttcgacagggccggcctgaccctgggcctgaaggccggcggctactggcccaacaacctggagaagaggggcctgatcaaccaccagagcaccgtgttcctgttcgaccccgacaccggcatggtgagggccatggtgggcggcaacctgctgaccgccctgaggaccgccgccgccagcagcgtgagcatcaagcacctggccaggaaggacgccaaggtgctgggcatgatcggcgccggccaccaggccaccttccagctgagggccgccctggagcagagggacttcgagaaggtgatcggctggaactaccaccccgagatgctgcccaacatcgccaccgtggccgaggaggccggcgtgcccttcgaggccgtggacctggagggcatgagggaggccgacgtgatcgtgagcatcaccagcgccttcgcccccagcctgctggccgaccacgtgagcgagggcacccacgtggcctgcatgggcaccgacaccaagggcaagcaggaggtggaggccaggctgctggccaaggccaccgtgttcaccgacgaggtggcccagagcatcagcatcggcgaggcccagcacgccgtggccgagggcctgatcagggccgaggacgtggccgagctgggcgccgtgatcaacggcacccaccccggcaggagcagcgacgaccagatcaccctgttcgacggcaccggcgtgggcctgcaggacctggccgtggccgccagcgtggtggacctggccgtggagaagggcgtggccatcgaggtggacttc

SEQ ID NO: 175 - DNA, 993 bp, Litoreibacter janthinus DSM 26921
atgggcggcatgcagaccgacgcccacaagctgaccatcgtgcccgagggcatgatcgccgacctgctgaccaggcaggccgccttcgacgccgtggagaaggtgttcgccagcatggccagcggcgaggccaggaacttccccgtggtgagggccgccctgggccacgaggacgccctgtacggcttcaagggcggcttcgacagggccggcggcgtgctgggcctgaaggccggcggctactggccccacaacctggagaggaggggcctgatcaaccaccagagcaccgtgctgctgttcgaccccgacagcggcagggtgaacgccatggtgggcggcaacctgctgaccgccctgaggaccgccgccgccagcagcgtgagcatcaagcacctggccagggacgacgccaagaccctgggcatgatcggcgccggccaccagagcgccttccagctgagggccgccctggagatcagggacttcgagaaggtgatcggctggaacctgcaccccgacaagctgggcagcctggcccaggtggccaagagcatgggcgtgcccttcgaggccgtgcccctggagaggatgaccgaggccgacgtgatcatcagcatcaccagcagcttcaacgccgtgctgatggccgaccacgtgagccccggcacccacgtggcctgcatgggcaccgacaccatcggcaagcaggaggtggaggtggccctgctggccaaggccagcgtgttcaccgacgaggtggcccagagcgtgagcatcggcgaggcccagcacgccatcagcatgggcctgatcaccgagaccgacgtgaagcagatcggcgccgtgatcagcggcagccacgtgggcaggcagagcgacgacgagatcaccctgttcgacggcaccggcgtgggcctgcaggacctggccgtggccgacagcatcgtgaaggccgccgtggcccagggcctggccaccgtggtgcagctg

SEQ ID NO: 176 - DNA, 981 bp, Paracoccus sp. 361
atgcagacccagagccccctgctgatcgtgcccgagcacctgatcgccgacctgatcagcgcccaggactgcttcgccgccgtggagcaggtgttcgccgccatggccagggacaccgcctacaacttccccgtgatcagggaggccatcggccacgccgacgccctgtacggcttcaagagcggcttcgacagggagagcctggccctgggcctgaagagcggcggcttctggcccaggaacgccgacaggggcctgaccaaccaccagagcaccatcttcctgttcgacgccgacaccggcaggtgcagggccgtggtgggcggcaacctgctgaccgccctgaggaccgccgccgccagcgccgtgagcatcaggcacctggccaggtgggacgccagggtgctgggcatgatcggcgccggccaccagagcatcttccagctgagggccgccctggaccagagggacttcgacagggtggtgggctggaacctgaaccccgccgacctggacaggctggccaaggtggccgacgagaggggcatccccttccaggccgtggacctggaccagctgggcgcccaggccgacgtgatcatcaccatcaccagcagcttcgcccccatcctgcaggccgcccaggtgaggcccggcacccacctggcctgcatgggcaccgacaccaagggcaagcaggaggtggaggccgccctgctgggcaaggccagcgtgttcaccgacgaggtggcccagagcgtgaccatcggcgaggcccagcacgccgtggcccagggcctgatcgccccccacgacatcatccagatcggcgccgtgatcaacggcgacaggcccggcagggtgagcgacgaccagatcaccctgttcgacggcaccggcgtgggcctgcaggacctggccgtggccagcgccgccgtggacctggccgtggagaggggcatcgccatcgccgtgcagatc

SEQ ID NO: 177 - DNA, 963 bp, Paracoccus homiensis DSM 17862
atgctgatcgtgcccgagagggagatcgccaacctgatgaccaggcaggccgccttcgaggccgtggagaaggtgttcgccgccatggccgccggcgacgcctacaacttccccgtggtgagggaggccatcggccacgaggacgccctgtacggcttcaagggcggcttcgacagggccggcctgaccctgggcctgaaggccggcggctactggcccaacaacctggagaagaggggcctgatcaaccaccagagcaccgtgttcctgttcgaccccgacaccggcaaggtgaaggccatggtgggcggcaacctgctgaccgccctgaggaccgccgccgccagcagcgtgagcatcaagcacctggccaggcccgacgccagggtgctgggcatggtgggcgccggccaccaggccaccttccagctgagggccgccctggagcagaggagcttcgacaaggtgatcggctggaactaccaccccgagatgctgcccaacatccagaaggtggccgacgaggccggcgtgcccttcgagaccgtggagctgaacggcatgaggcaggccgacgtgatcatcagcatcaccagcgccttcgcccccagcctgatggccgaccacgtggcccccggctgccacgtggcctgcatgggcaccgacaccaagggcaagcaggaggtggaggccgccctgctggccagggccaccgtgttcaccgacgaggtggcccagagcgtgcagatcggcgaggcccagcacgccgtggcccagggcctgatcgccgagagcgacgtgacccagatcggcgccgtgatcaacggcacccaccccggcagggacagcgacgaccagatcaccctgttcgacggcaccggcgtgggcctgcaggacctggccgtggccgccagcgtggtggacctggccgtgcagcagggcatcgccatcaccgtggacttc

SEQ ID NO: 178 - DNA, 990 bp, Ponticoccus sp. UMTAT08
atgaaggacatgcccgagacccagggcctggtgatcgtgggcgaggccgagtgcgagaggctggtgggcaggaaggacgccttcgacgccgtggaggccgtgttcggcgccatggccaagggcgacgcctggaacttccccgtggtgagggaggccatcggctacgccgacgccctgtacggcttcaagagcggcttcgacaaggccggcaaggtgctgggcgtgaagagcggcggctactggcccggcaacatggacaagggcctgaccaaccaccagagcaccgtgttcctgttcgaccccgacaccggccagctggccgccctggtgggcggcaactacctgaccgccgtgaggaccgccgccagcagcgccgtgagcatcgcccacctggccaggaaggacgccaaggtgctgggcatggtgggcgccggccaccagagccagttccagctgagggccgccgccgagcagagggacttcgagaaggtggtggcctggaacccccaccccgagatgctgcccaagctgggcgccgtggccgaggagctgggcctgcccttcgaggccgtgacccaggagcagctgggcgcccaggccgacgtgatcatcaccatcaccagcgccttcgagcccctgctgatgaaggactggatcaagcccggcacccacatcgcctgcatgggcaccgacaccaagggcaagcaggaggtggacgccgccctggtggccgccaccaccgtgttcaccgacgaggtggcccagagcatcagcatcggcgaggcccagcacgccatcgccgagggcagcctgaccgaggacaggatcacccccatcggcgccgtgatcaacggcgcccaccccggcaggagcagcgacgacgagatcaccctgttcgacggcaccggcgtgggcctgcaggacctggccgtggccagcgtggccgccaggctggccgaggaggagggcagcgccaagagggtgagcctg

SEQ ID NO: 179 - DNA, 1002 bp, Marinobacter psychrophilus 20041
atggacaccagcagcgaggccctgacccagccccaccagatcctgatcgtgagcgaggacgcctgccagaaggtgatcggcaggcacgaggccttccaggccgtggagagcgtgttcagcagcatggccaagggcagcgcctacaacttccccgtggtgagggaggccatcggccacgccaacgccctgtacggcttcaagagcggcttcgacagggagggcctggtgctgggcgtgaaggccggcggctactggcccggcaacgtggtgcagggcaggaccaaccaccagagcatcgtggccctgttcgaccccgacaccggccagctgaaggccctggtgagcggcaactacctgaccgccatcaggaccgccgccagcagcgccgtgagcatcgcccacctggccaggaagaacgccaaggtgctgggcatgatcggcgccggcttccagagcaccttccagctgcacgccgccctggagcagagggacttcgagaaggtggtggcctggaacacccaccccgagcacctgaccaggctggccgacgtgtgcagggagcacaacctgcccttcgaggccgtgagcctgcaggccctgggcagccagagcgacgtgatcatcaccatcaccagcgccagcgagcccctgctgcaggccgcctgggtgaagcccggcacccacctggcctgcatgggcaccgacaccaagggcaagcaggagatcgaccacaggatcctggcccaggccaccgtgttcaccgacgagatcgaccagagcatcagcatcggcgaggcccagcacgccgtgaccgccaggatcctgagcgccgagcagatcacccccatcggcgaggtgatcaacggcctgcaccagggcaggcagagcgagcaggagatcaccctgttcgacggcaccggcgtgggcctgcaggacctggccgtggccagcgccgccgccagcctggccgaggtgaggggcctggcccagagggtgaccctg

SEQ ID NO: 180 - DNA, 963 bp, Methylobacterium sp. Leaf361
atgatcatcgtgcccgagcacgccatcgacggcctgctgaccgaggccgagtgcttcaccgccgtggagcaggtgttcgccagcatggccaggaggagggccggcaacttccccgtggtgagggaggccatcggccacgccgacgccctgtacggcttcaagagcggcttcgacagggacagcctggccctgggcctgaaggccggcggcttctggcccggcaacgccgccaagggcctgaccaaccaccagagcaccgtgttcctgttcgacgccgacaccggcaggtgcagggccgtggtgggcggcaacctgctgaccgccctgaggaccgccgccgcctgcgccatcagcgtgaggcacctggccaggaaggacgccagggtgctgggcatgatcggcgccggccaccagagcgccttccagctgagggccgccctggcccagaggcccttcgagagggtgctggcctggaacctgcaccccggcatgttcggcaggatggaggccgtggccagggagcacggcgtgcccttcgaggccgtggacctggacaggctgggcgccgaggccgacgtggtggtgaccatcaccagcagcttcgcccccatcctgaaggccgcccaggtgaggcccggcacccacctggcctgcatgggcaccgacaccaggggcaagcaggaggtggaggccgagctgctggccggcgccaccgtgttcaccgacgaggtggcccagagcgtgagcatcggcgaggcccagcacgccgtgaccaggggcctgctggccgccgacagcatcgtggagatcggcgccgtgatcaacggcgaccaccccggcagggtgagcgagagcgagatcaccctgttcgacggcaccggcgtgggcctgcaggacctggccgtggccgccgtggccgtggacagggccgtggccaagggcctggccaccgaggtggacgtg

SEQ ID NO: 181 - DNA, 996 bp, Aestuariivita boseongensis BS-B2
atgggcctggacggcgccatgaccgacagcgccgtgaccatcgtgcccgagggcgagatcgccggcctgatcaccccccagatcgccttcgacgccgtggaggccaccttcgccgccatgagcaggaagagcgcctacaacttccccgtgatcagggagagcatcggccacgccgacgccctgtacggcttcaagagcggcttcgacagggacagcctggccctgggcctgaagagcggcggctactggcccggcaacgaggccaagggcctgaccaaccaccagagcaccgtgatcctgttcgacgccgacaccggcaaggtgaaggccctggtgggcggcaacctgctgaccgccctgaggaccgccgccgccagcgccgtgagcatcaagcacctggccagggaggacgccaaggtgctgggcatgatcggcgccggccaccagagcgccttccagatgagggccgccgtggcccagaggaacttcgagaaggtggtgggctggaactaccaccccgagatgctgagcaggctggaggacaccgccaccgagctgggcctgcccttcgaggccgtgagcctggaggagctgggcgcccagagcgacgtgatcatcagcatcaccagcagcttcgcccccagcctgctggacgcccacgtgaagcccggcacccacatcgccgccatgggcaccgacaccaagggcaagcaggagatcgacgcccccatcctggccagggccaccgtgttcaccgacgagatcgcccagagcatcaccatcggcgaggcccagcacgccatcgccgacggcagcctgaccgagggccagatcaccgagatcggcgccgtgatcaacggcgaccacgccggcaggaccagcgccgacgagatcaccgtgttcgacggcaccggcgtgggcctgcaggacctggccgtggccagggtggccgtggacctggcccaggccaagggcgtggccagcaaggtggacttc

SEQ ID NO: 182 - DNA, 963 bp, Paracoccus isoporae DSM 22220
atgctgatcgtgcccgagagggagatcgccgacctgatgaccaggagcgccgccttcgacgccgtggagaaggtgttcgccgccatggccagcggcgacgcctacaacttccccgtgatcagggaggccatcggccacgccgacgccctgtacggcttcaagggcggcttcgacagggccggcctgaccctgggcctgaaggccggcggctactggcccaacaacctggaccagcacggcatcatcaaccaccagagcaccgtgttcctgttcgaccccgacaccggcagggtgagggccatggtgggcggcaacctgctgaccgccctgaggaccgccgccgccagcagcgtgagcatcaggcacctggccagggacgacgccaaggtgatcggcatgatcggcgccggccaccaggccaagttccagctgagggccgccctggagcagagggacttcgagaaggtgatcggctggaacctgcaccccgagatgctgcccaacctggaggaggtggccgccgaggccggcctgcccttcgaggccgtggagctggacggcatcagggaggccgacgtgatcatcagcatcaccagcagcttcgacgccatcctgatggccgaccaggtgagccccggcacccacatcgcctgcatgggcaccgacaccaagggcaagcaggaggtggaccccgccctgctggccagggccaccgtgttcaccgacgaggtggcccagagcgtgagcatcggcgaggcccagcacgccgtggccgccggcctgatcgccgagagcgacatcacccagatcggcgccgtgatcaacggcacccaccccggcagggccagcgccgaggagatcaccctgttcgacggcaccggcgtgggcctgcaggacctggccgtggccgccgccgtggtggacctggccgtgcagaacggcgtggccgtggaggtggacttc

SEQ ID NO: 183 - DNA, 963 bp, Aminobacter aminovorans KCTC 2477
atgatcatcatccccgagagggacatcgccggcctggtgagcgccgccgactgcttcgtggccgtggagcagaccttcgccagcatggccaagcagagcgccaggaacttccccgtgatcagggaggccctgggccacgccgacgccctgtacggcttcaagagcggcttcgacagggagagcctggccctgggcctgaagagcggcggctactggcccaacaacgcccagaagggcctgaccaaccaccagagcaccgtgttcctgttcgacgccgacaccggcaggtgcagggccatcgtgggcggcaacctgctgaccgccctgaggaccgccgccgccagcgccgtgagcatcaagcacctggccaggcccgacagcaaggtgctgggcatcgtgggcgccggccaccagagcaccttccagctgagggccgccctggagcagaggcccttcgagaaggtgctggcctggaacaagacccccgagaagctggagaggctggccagcgtggccagggagaagggcctgcccttccagagcgtgagcctggagcagctgtgcggcgaggccgacgtggtgatcaccatcaccagcagcttcagccccgtgatcgccgagggcctgatcaggcccggcacccacctggcctgcatgggcaccgacaccaagggcaagcaggaggtggcccccgagatcgtggccggcagcaccgtgttcaccgacgaggtggtgcagagcaccagcatcggcgaggcccagcacgccttcaggctgggcatgatcgacgccgccgccatcatccccatcggcgtggtggtgaacggcgaccaccccggcaggaggagcgccgaggagatcaccctgttcgacggcaccggcgtgggcctgcaggacctggccgtggccagcgccgccgtggacctggccctggccaggggcaccgccatcgaggtggacgcc

SEQ ID NO: 184 - DNA, 963 bp, Aminobacter aminovorans KCTC 2477
atgatcatcgtgcccgagagggagatcgcctggctggtgagcgacgccgactgcttcgccgccgtggagagggtgttcgccagcatggccaagaagagcgccagcaacctgcccgtggtgagggaggccatcggccacctggacgccatctacggcgtgaagagcggcatcgacagggagggcctggtgctgggcctgaagagcggcggcttctggcccaacaacgtgagcaggggcctgaccaaccaccagagcaccatcatgctgttcaacgccgacaccggcgagtgcagggccgtggtgggcgccaacctgctgaccgccctgaggaccgccgccgccagcgccatcagcatcaagtacctgagcaggcccgacagcaaggtgctgggcatcatcggcgccggccaccagagcaccttccagctgaaggccgccctgcagcagagggccttcgagaaggtggtgggctggaacatcgtgccccagcacctggccaggctggagaccgtggccgccgagcacggcctgcccttcgagagggtggacctggacaccctgggcgcccaggccgacgtgatcatcaccatcaccagcagcttcgaccccatcctgagggccggccaggtgaggcccggcacccacctggcctgcatgggcaccgacaccaagggcaagcaggaggtggacgccaggctgctggccaacgccaccgtgttcaccgacgaggtggcccaggccgtgaccatgggcgagacccagcacgccgtggccgagggcctggtggacgccagcgccatcatcgccatcggcgccgtgatcaacggcgaccacagcggcagggtgagcgccgaggagatcaccctgttcgacggcaccggcgtggccctgcaggacctggccgtggccagcgtggccgtggagagggccgtggccaccggcgtggccaccaccatcgccttc

SEQ ID NO: 185 - DNA, 963 bp, Loktanella litorea DSM 29433
atgatcatcgtgcccgagagggagatcgccgacctgatgaccagggccgccgccttcgacgccgtggagaaggtgttcgccgccatggccgccgacgacgcctacaacttccccgtggtgagggaggccatcggccacgaggacgccctgtacggcttcaagggcggcttcgacagggccggcaaggtgctgggcctgaaggccggcggctactggccccacaacctggagaagaggggcgagatcaaccaccagagcaccgtgttcctgttcgaccccgacaccggcaaggccaaggccatgatcggcggcaacctgctgaccgccctgaggaccgccgccgccagcagcgtgagcatcaagcacctggccagggaggacgccaaggtgatgggcatgatcggcgccggccaccaggccaccttccagctgagggccgccctggagcagaggagcttcgagaaggtgatcggctggaactaccaccccgacatgctgcccaacatcgccaagatcgccgaggaggccggcctgcccttcgaggccgtggacctgcccggcatggccgaggccgacgtgatcatcagcatcaccagcgccttcgcccccagcctgatggccgaccacgtgagcgccggcacccacatcgcctgcatgggcaccgacaccaagggcaagcaggaggtggaggccgccctgctggccaaggccaccgtgttcaccgacgaggtggcccagagcgtgagcatcggcgaggcccagcacgccgtggccgagggcctgatcgccgagagcgacgtgcaccagctgggcgccgtgatcaacggcacccaccccggcagggtgagcgccgacgacatcaccctgttcgacggcaccggcgtgggcctgcaggacctggccgtggccgccagcgtggtggacctggccatcgagaagggcatcgccatcgaggtggacttc

SEQ ID NO: 186 - DNA, 996 bp, Marinobacterium lutimaris DSM 22012
atgaccacccccgccagcggcgccggcaaccccatcagcatcgtgagcgaggccgtgtgccagcagatcgtgggcaggcccgaggccttcaaggccgtggagaacgtgttcgccgccatggccaggggcgacgcctacaacttccccgtggtgagggaggccatcggccacgccgacgccctgtacggcttcaagagcggcttcgacagggccggcatggccctgggcgtgaagagcggcggctactggcccggcaacgtgcagaaggacctgaccaaccaccagagcaccgtgatcctgttcgaccccgacaccggccagctgaagagcctggtgggcggcaactacctgaccgccgtgaggaccgccgccgccagcgccgtgagcatcgcccacctggccaggaaggacgccaaggtgctgggcatgatcggcgccggccaccagagcaccttccagctgagggccgccctggagcagagggacttcgagaaggtggtggcctggaacccccaccccgagcacctgcccaggctggccgccgtgtgcgaggagctgagggtgcccttcgaggccgtgacccagcaggagctgggcgcccaggccgacgtgatcatcaccatcaccagcgccttcgagcccctgctgctgaaggagtggatcaagcccggcacccacatcgcctgcatgggcaccgacaccaagggcaagcaggaggtggaccccgccctgctggccgccgccagcgtgttcaccgacgaggtggcccagagcgtgctgctgggcgaggcccagcacgccgtggccagcggcctgatcgccgagagcgacatcacccccatcggcgaggtgatcaacggcacccacgtgggcaggagggacgaccaggagatcaccctgttcgacggcaccggcgtgggcctgcaggacctggccgtggccagcgccgccgccgagctggccgaccagaagggcctgagccagaccatcgtgctg

SEQ ID NO: 187 - DNA, 990 bp, Rubrimonas cliftonensis DSM 15345
atgaaggacgccgccgacgccgccgccatcgccatcgtgagcgaggacgtgtgcaaggaggtggtgagcagggccgacgccttcgaggccgtggagaaggtgttcgccgccatggccaggggcgacgcctacaacttccccgtgatcagggaggccatcggccacgccgacgccctgtacggcttcaagagcggcttcgacagggccggcctggtgctgggcctgaagagcggcggctactggcccggcaacgccgccaggggcctgaccaaccaccagagcaccgtgttcctgttcgaccccgacaccggcaggctgagggccctggtgggcggcaaccacctgaccgccctgaggaccgccgccgccagcgccgtgagcatcgcccacctggccaggagggacgccaaggtgctgggcatggtgggcgccggccaccaggcccagttccagctgagggccgccgccgagcagaggaggttcgagagggtggtggcctggaactaccaccccgacatgctgcccaagctgggcgccgtggccgccgagatcggcctgcccttcgaggccgtggagagggagaggctgtgcgccgaggccgacgtgatcatcaccatcggcagcagcaccgagccccagatcatggccgactgggtgaagcccggcacccacctggcctgcatgggcaccgacaccaggggcaagcaggaggtggaccccgccctgctggccagggccaccgtgttcaccgacgaggtggcccagagcatcaccatcggcgaggcccagcacgccgtggcccagggcctgatcggcgaggacgccgtgacccccctgggcagggtgatcaacggcgaccaccccggcaggaccggcgacgacgagatcaccctgttcgacggcaccggcgtgggcctgcaggacctggccgccgccgccgtggccatggccagggccgtggagagcggcaaggcccagaccctgaccctg

SEQ ID NO: 188 - DNA, 963 bp, Planktotalea frisia SH6-1 (PFRI); identical to SEQ ID NO: 96

SEQ ID NO: 189 - DNA, 963 bp, Aureimonas altamirensis ON-56566
ctgatcatcgtgcccgagagggacatcgccggcctgatcggccccgccgactgcctggccgccgtggagggcgtgttcgccgccatggccaggggcaccgccaggaacttccccgtggtgagggaggccctgggccacgccgacgccctgtacggcttcaagagcggcttcgacgccgagagcctggccctgggcctgaagagcggcggcttctggcccggcaacatggccaggggcctgaccaaccaccagagcaccatcttcctgttcgacgccgacaccggccagtgcagggccatcgtgggcggcaacaggctgaccgccctgaggaccgccgccgccagcgccatcagcatcaagtacctggccagggaggacgccagggtgctgggcatcatcggcgccggccaccagagcaccttccagctggaggccgccctggagcagagggccttcgagaagatcgtgggctggaacgtggagcccgacatgctgagcaagctggaggaggtggccgccaggaggggcctgcccttcgagagggtggacctggacggcctgggcgcccaggccgacgtgatcatcaccatcaccagcagcttcgcccccatcctgaaggccgcccaggtgaggcccggcacccacatcgcctgcatgggcaccgacaccgtgggcaagcaggaggtggaggccgagctggtgagcagggccagcgtgttcaccgacgaggtggcccaggccgtgaccctgggcgagagccagcacgccgtggccgccggcctggtggacgccggcagcatcgtggagatcggccaggtggtgaccggcgcccaccccggcaggaccagcgccgaggagatcaccctgttcgacggcaccggcgtgggcccccaggacctggccgtggccagcgccgtggtggacctggccgtgaggaagggcatcgccaccgaggtggagttc

SEQ ID NO: 190 - DNA, 1002 bp, Marinobacter sp. Hb8
atggagaccagcagcaaggagcccagccagccccaccagatcctgatcgtgaacgaggacgcctgcagggaggtgatcggcaggcacgaggccttccaggccgtggaggccgtgttcgccagcatggccaggggcggcgcctacaacttccccgtggtgagggaggccatcggccacgccgacgccctgtacggcttcaagagcggcttcgacagggaggccctggtgctgggcgtgaagagcggcggctactggcccggcaacgccgccaggggcctgaccaaccaccagagcaccgtggtgctgttcgaccccgacaccggcaggctgaaggccctggtgggcggcaactacctgaccgccgtgaggaccgccgccagcagcgccgtgagcatcgcccacctggccaggaaggacgccaaggtgctgggcatggtgggcgccggctaccagagcaccttccagctgaaggccgccctggagcagagggccttcgagaaggtggtggcctggaacgcccaccccgagcacctgaccaggctggccgccatctgcgaggagaagggcatccccttcgagggcgtgagcaggcaggagctgggcgcccagagcgacgtgatcatcaccatcaccagcgccttcgagcccctgctggacgccgactggatcaagcccggcacccacctggcctgcatgggcaccgacaccaagggcaagcaggaggtggaccacaagctgctggcccaggccaccgtgttcaccgacgagatcgcccagagcatcagcatcggcgaggcccagcacgccgtggccgcccagatcctgagcgaggaccagatcacccccatcggcgaggtgatcaacggcaccaaccccggcaggcagagcgaggccgacatcaccctgttcgacggcaccggcgtgggcctgcaggacctggccgtggccagcgaggccgccaggctggccgagaccggcggcctggcccagagggtgaccctg

SEQ ID NO: 191 - DNA, 987 bp, Ruegeria sp. ZGT108
atgaaggacatgagcgacaacggcctgctgatcgtgagcgaggacctgtgccagcagctggtgggcaggaaggaggccttcgacgccgtgcaggacgtgttcgccgccatggccaggggcgacgcctacaacttccccgtgatcagggaggccatcggctacgccgacgccctgtacggcttcaagagcggcttcgacagggccggccaggtgctgggcgtgaagagcggcggctactggcccggcaacaccgagaagggcctgaccaaccaccagagcaccgtgttcctgttcgaccccgacaccggcaggctgagcgccctggtgggcggcaactacctgaccgccgtgaggaccgccgccagcgccgccgtgagcatcgcccacctggccaggagggacagcaaggtgctgggcatggtgggcgccggccaccagagcaccttccagctgagggccgccgccgagcacagggacttcgagaaggtggtggcctggaacccccaccccgagatgctgcccaggctggagggcgtggcccacgaggtgggcctggagttccaggccgtgacccaggaggagctgggcgcccaggccgacgtgatcatcaccatcaccagcgccttcgagcccctgctgatgaaggactggatcaagcccggcacccacctggcctgcatgggcaccgacaccaagggcaagcaggaggtggacgccatgctggtggcccacgccaccgtgttcaccgacgaggtggcccagagcatcaccatcggcgagacccagcacgccgtggccgacggccagctgaccaaggaccagatcacccccatcggcgccgtgatcaacggcgaccaccccggcaggggcagcgacgaggagatcaccctgttcgacggcaccggcgtgggcctgcaggacctggccgtggccagcgtggccgccaagctggccgacaaggccggcctggccggcagggccaccctg

SEQ ID NO: 192 - DNA, 960 bp, Paracoccus sediminis DSM 26170
atgtgggtggtgcccgagcacgagatcgccggcctgatgacccccgaggccgccttcgacgccgtggaggccgtgttcgccgccatggccaggggcgacgccaggaacttccccgtggtgagggaggccctgggccacgaggacgccctgtacggcttcaagggcggcttcgacggcgccggcatgaccctgggcctgaaggccggcggctactggcccaacaaccagaagcacggcctgatcaaccaccagagcaccgtgttcctgttcgaccccgacaccggcagggtgagcgccgccgtgggcggcaacctgctgaccgccctgaggaccgccgccgccagcgccgtgagcagcaagtacctggcccccgagggcgccagggtgctgggcatgatcggcgccggccaccagagcgccttccagatgagggccgccgtgaggttcggccagttcgagaaggtggtgggctggaacccccaccccgccatgctgagcaggctggccgacaccgccgccgagctgggcctgcccttcgaggccgtggacctgccccagctgggcgccgacgccgacgtgatcatcaccatcaccagcgccttcgagcccctgctgctggacggccacgtgaccggccccacccacatcgccgccatgggcaccgacaccaagggcaagcaggagctggaccccgccctggtggccagggccaggctgttcaccgacgaggtggcccagagcgtgagcatcggcgagttccagcacgccagcgcccagaagaccgtgagcgccgacgacatcaccgccctgggccaggtgatcatcggcaaccaccccggcaggggcgacgcccaggtgaccatcttcgacggcaccggcgtgggcctgcaggacctggccgtggccagcgccgtggtggagctggccaagcagcacggcaaggccatccaggtggccatc

SEQ ID NO: 193 - DNA, 963 bp, Ruegeria scottomollicae DSM 25328
atgtacatcgtgcccgagagggccatcgccgacctgatgaccaggaaggccgccttcgacgccgtggagcaggtgttcgccgccatggccgccggcgacgcctacaacttccccgtggtgagggaggccatcggccacgaggacgccctgtacggcttcaagggcggcttcgacagggccggcctgaccctgggcctgaaggccggcggctactggcccaacaacctggagaagaggggcctgatcaaccaccagagcaccgtgttcctgttcgaccccgacaccggcaaggtgagggccatggtgggcggcaacctgctgaccgccctgaggaccgccgccgccagcagcgtgagcatcaagcacctggccagggaggacgccaaggtgatcggcatgatcggcgccggccaccaggccaagttccagctgagggccgccctggagcagagggagttcgacaaggtgatcggctggaacctgcaccccgagatgctggccaacctggaggaggtggccaccgaggccggcctgcccttcgaggccgtggagctggacggcctgaaggaggccgacgtgatcatcagcatcaccagcagcttcgacgccatcctgaaggccgaccaggtgagccccggcacccacatcgcctgcatgggcaccgacaccaagggcaagcaggaggtggaccccgagctgctggtgagggccgacgtgttcaccgacgaggtggcccagagcatcagcatcggcgaggcccagcacgccgtggcccagggcctgatcgccgaggccgacgtggcccagctgggcgccgtgatcaacggcgcccaccccggcaggaccagcgccgagcagatcaccctgttcgacggcaccggcgtgggcctgcaggacctggccgtggccagcagcgtggtggagctggccgtgaagcagggcatcgccatcgaggtggacttc

SEQ ID NO: 194 - DNA, 963 bp, Rhizobium leguminosarum CGMCC 1.2553T
atgatcatcgtgcccgagagcgccgtgagggacctggtgagcctggaggactgcgtgaacgccgtggagaaggccttcgtgagcatggccgagaggagcgcccagaacttccccgtggtgagggaggccatcggctacgaggacgccctgttcggcttcaagagcggcttcaacagggagggcctggccctgggcctgaaggccggcggcttctggcccaacaacgccagcaagggcctgaccaaccaccagagcaccgtgttcctgttcgaccccgagaccggcaggtgcagggccgtggtgggcggcaacctgctgaccgccctgaggaccgccgccgccagcgccgtgagcatcaagtacctggccaggaaggacgccaaggtgctgggcatggtgggcgccggccaccaggccagcttccagctgagggccgccgtgcagcagagggccttcgagaaggtggtggcctggaacttccaccccgagatgctgcccaagctggccgccgtggccgacgagctggccatccccttcgaggccgtggagctggacaggctgggcgacgaggccgacgtgatcatcaccatcaccagcagcttccagcccatcctgaaggcccagcaggtgaggcccggcacccacctggcctgcatgggcaccgacaccaagggcaagcaggaggtggacgccgccctgttcgccagcgccaccctgttcaccgacgagatcgcccaggccatcagcatcggcgagagccagcacgccatcgcccagggcctggtggcccccgtggacatcggcgagatcggcgccgtgatcagcggcaggatccccggcaggagcagcgccgaccaggtgaccctgttcgacggcaccggcgtgggcctgcaggacctggccgtggcccaggccgccgtggagctggccatcgccaggggcaccgccgtggagatcgagatc

SEQ ID NO: 195 - DNA, 963 bp, Sulfitobacter sp. HI0021
atgctgatcgtgcccgagagggagatcgccaacctgatgaccagggaggccgccttcgacgccatcgagaaggtgttcgccgccatggccagcggcgacgcctacaacttccccgtggtgagggaggccatcggccacgaggacgccctgtacggcttcaagggcggcttcgacagggccggcctgagcctgggcctgaaggccggcggctactggcccaacaacctggagaagaggaacctgatcaaccaccagagcaccgtgttcctgttcgaccccgacaccggcaaggtgaaggccatggtgggcggcaacctgctgaccgccctgaggaccgccgccgccagcagcgtgagcatcaagcacctggccaggaagaacgccaccgtgatcggcatggtgggcgccggccaccaggccaccttccagctgagggccgccctggagcagaggaagttcgagaaggtgatcggctggaactaccaccccgagatgctgcccaacatcgagaaggtggcccacgaggccggcgtgcccttcgaggccgtggacctgcccggcatgaccgaggccgacgtgatcatcagcatcaccagcgccttcagccccagcctgatggccgaccacgtgagccccggcacccacatcgcctgcatgggcaccgacaccaagggcaagcaggaggtggaggccgccctgctggccagggccagcgtgttcaccgacgaggtggcccagagcgtgagcatcggcgaggcccagcacgccatcgccgagggcctgatcaaggacaccgacgtggcccagctgggcgccgtgatcaacggcaccaaccccggcaggaccagcgaccaccagatcaccctgttcgacggcaccggcgtgggcctgcaggacctggccgtggccgccaaggtggtggacctggccgtggagcagggcgtggccatcgacgtggacttc

SEQ ID NO: 196 - DNA, 963 bp, Sulfitobacter sp. HI0076; identical to SEQ ID NO: 195

SEQ ID NO: 197 - DNA, 963 bp, Thalassobius mediterraneus CECT 5118; identical to SEQ ID NO: 34

SEQ ID NO: 198 - DNA, 996 bp, uncultured Rhodobacteriaceae sp. PT6CLA
atgaacgacatgacccaggcccagaccgacggcctgatcatcgtgagcgaggagatctgccagcaggtgatcggcaggcaggacgccttcgacgccgtggaggccgtgttcggcgccatggccaagggcgacgcctacaacttccccgtgatcagggaggccatcggccacgccgacgccctgtacggcttcaagagcggcttcgacagggccggcctggccctgggcctgaagagcggcggctactggcccggcaacgccgacaagggcctgaccaaccaccagagcaccgtgttcctgttcgaccccgacaccggcaagctgaaggccctggtgggcggcaactacctgaccgccctgaggaccgccgccgccagcagcgtgagcatcgcccacctggccaggaaggacgccaaggtgctgggcatggtgggcgccggccaccagagcgccttccagctgagggccgccgccgagcagagggacttcgagaaggtggtggcctggaacccccaccccgagatgctgcccaagctgggcgaggtggccacccagatcggcctggagttcgaggccgtggagagggaccagctgggcgccgaggccgacgtgatcatcaccatcaccagcgccttcgagcccctgatgatggccagccagatcaagcccggcacccacatcgcctgcatgggcaccgacaccgtgggcaagcaggaggtggaccccgccctgctggccgccgccaccgtgttcaccgacgaggtggcccagagcatcagcctgggcgaggcccagcacgccatcgcccagggcctgatcgccgaggccgacatcacccccatcggcaacgtgatcaacggcacccaccccggcaggagcagcgccgacgagatcaccctgttcgacggcaccggcgtgggcctgcaggacctggccgtggccagcgtggccgccgacctggccgccaaggccggcaccgccaccagggtggccctg

SEQ ID NO: 199 - DNA, 963 bp, Sinorhizobium terangae WSM1721
atgatcatcgtgcccgagaaccagatcgccggcctgatcacccccgccgactgcctggccgccgtggagggcgtgttcgccagcatggccaagaggagcgcctacaacttccccgtgatcagggaggccatcggccacgccgacgccctgtacggcttcaagagcggcttcgacagggacagcctggccctgggcctgaagagcggcggcttctggcccaacaacgtgcagaagggcctggccaaccaccagagcaccgtgttcctgttcgacgccgacaccggcaggtgcagggccgtggtgggcggcaacctgctgaccgccctgaggaccgccgccgccagcgccgtgagcatcaagtacctggccaggagggacgccaaggtgctgggcatgatcggcgccggccaccagagcacctaccagctgagggccgccgtggagcagaggcccttcgagaaggtgctggcctggaacctgcaccccgagatgctgagcaggctggagggcgtggccagggagctggagctgcccttcgagaccgtggacctggacaggctgggcgacgaggccgacgtgatcatcagcatcaccagcagcttcgcccccatcctgaaggccagccaggtgaggcccggcacccacctggcctgcatgggcaccgacaccaagggcaagcaggagatggacgccgagctgctggccgccgccaccgtgttcaccgacgaggtggcccaggccgtgaccatcggcgagtgccagcacgccatcgagaagggcctgatcagcagggacgacatcgtggagatcggcgccgtgatcaccggcaggcacaccggcaggagcagccccgaggagatcaccctgttcgacggcaccggcgtgggcctgcaggacctggccgtggccagcgccgccgtggagctggccctgagcaagggcaccgccatcgaggtggacttc

SEQ ID NO: 200 - DNA, 963 bp, Ruegeria sp. TW15; identical to SEQ ID NO: 117

SEQ ID NO: 201 - DNA, 963 bp, Rhizobium sp. BR816
atgatcatcgtgcccgagaaccagatcgccggcctgatcacccccgccgactgcctgctggccgtggagggcgtgttcgccagcatggccgagaggagcgcctacaacttccccgtgatcagggaggccatcggccacgccgacgccctgtacggcttcaagagcggcttcgacagggacagcctggccctgggcctgaagagcggcggcttctggcccaacaacgtggagaagggcctggccaaccaccagagcaccgtgttcctgttcgacgccgacaccggcggctgcagggccgtggtgggcggcaacctgctgaccgccctgaggaccgccgccgccagcgccgtgagcatcaagtacctggccaggaacgacgccaaggtgctgggcatgatcggcgccggccaccagagcacctaccagctgagggccgccgtggagcagaggcccttcgagaaggtgctggcctggaacctgcaccccgagatgctgagcaggctggagaggatcgccagggagctggagctgcccttcgagaccgtggacctggacaggctgggcgccgagagcgacgtgatcatcagcatcaccagcagcttcgcccccatcctgaaggccagccaggtgaggcccggcacccacctggcctgcatgggcaccgacaccaagggcaagcaggaggtggaccccgagctggtggccgccgccaccgtgttcaccgacgaggtgggccaggccgtgaccatcggcgagtgccagcacgccatcgacaagggcctgatcagcaaggacgacatcgtggagatcggcgccgtgatcaccggcaggcacaagggcaggagcagcagcgaggagatcaccctgttcgacggcaccggcgtgggcctgcaggacctggccgtggccagcgccgccgtggagctggccctgagcaagggcgccgccatcgaggtggacttc

SEQ ID NO: 202 - DNA, 1002 bp, Glaciecola sp. ANT9081 (cola82)
atgatcatccagaacgacgagatgaacaccgacaagggcatcaccatcatcagcgaggccatctgcgaggccgtggtgggcaggcccgaggccttcaccgccgtggagaacgtgttcgccgccatggccaagggcgacgcctacaacttccccgtggtgagggaggccatcggccacgccgacgccctgtacggcttcaagagcggcttcgacagggccggcatggccctgggcgtgaagagcggcggctactggcccggcaacgccaagaagaacctgaccaaccaccagagcaccatcttcctgttcgaccccgacaccggccagctgatcagcctggtgggcggcaaccacctgaccgccatgaggaccgccgccagcagcgccgtgagcatcgcccacctggccaggaaggacgccaaggtgctgggcatggtgggcgccggccaccagagcaccttccagctgagggccgccctggagcagaggaagttcgagaaggtggtggcctggaacctgcacagcgccgacctgcagaggctggccaaggtgtgcgaggagctgggcctgcccttcgaggccctggagaggaaggagctgggcgcccaggccgacgtgatcatcaccatcaccagcgccttcgagcccctgatgatgaaggagtggatcaagcccggcacccacatcgcctgcatgggcaccgacaccaagggcaagcaggaggtggaccccgagctgctggtggccgccaccgtgttcaccgacgagatcgcccagagcgtgagcatcggcgaggcccagcacgccatcgccagcggcaccatcaaggccgaggacatcgtgcccatcggcgaggtgatcaacggcacccaccccggcaggctgagcgacgaggagatcaccctgttcgacggcaccggcgtgggcctgcaggacctggccgtggcccaggccgccgccgtgctggccgagaagcagggcctggccgtgagcatcaacctg

SEQ ID NO: 203 - DNA, 963 bp, Paracoccus pantotrophus J40
atgtggatcgtgcccgagaaggagatcgccggcctgatgacccccgaggccgccttcgacgccgtgcaggccgtgttcgccgccatggccagcggcaaggccagcaacttccccgtggtgagggaggccatcggccacgaggacgccctgtacggcttcaagggcggcttcgacaggagcgccaggaacctgggcctgaaggccggcggctactggcccaacaaccagaggagggagctgatcaaccaccagagcaccgtgttcctgttcgacgccgacaccggcagggtgcaggccgccgtgggcggcaacctgctgaccgccctgaggaccgccgccgccagcgccgtgagcatcaagtacctggccaggcccgacgccaaggtgctgggcatcgtgggcgccggccaccagagcacctaccagctgagggccgccctggaccagaggcccttcgagaaggtgctggcctggaacaggacccccgagaggctgaagaggctggaggccgccgcccaggagaagggcctgcccttcaagagcgtgaccctggagcagctgtgcaggcaggccgacgtggtggtgaccatcaccagcagcttcagccccatgatcgccgagggcctgatcaggcccggcacccacctggcctgcatgggcaccgacaccaggggcaagcaggaggtggcccccgagatcgtggccgccagcaccgtgttcaccgacgaggtggcccagagcaccaccatcggcgaggcccagcacgccttcggcatgggcctgctggacgccgccgccatcgtgcccatcggcgacgtgatcaacaaggagcaccccggcaggaggagcgccgaggagatcaccctgttcgacggcaccggcgtgggcatccaggacctggccgtggccagcgccgccgtggacctggccgtggccaggggcagggccgtggaggtggagatg

SEQ ID NO: 204 - DNA, 960 bp, Paracoccus pantotrophus J40; identical to SEQ ID NO: 45

SEQ ID NO: 205 - DNA, 963 bp, Marinovum algicola DG 898
atgttcatcgtgcccgagagggacatcgccgacctgatgaccagggaggccgccttcgacgccgtggagaaggtgttcgccgccatggccagcggcgacgcctacaacttccccgtggtgagggaggccatcggccacgaggacgccctgtacggcttcaagggcggcttcgacagggccggcctgaccctgggcctgaaggccggcggctactggcccaacaacctggagaagaggggcatcatcaaccaccagagcaccgtgttcctgttcgaccccgacaccggcaaggccaaggccatggtgggcggcaacctgctgaccgccctgaggaccgccgccgccagcagcgtgagcatcaagcacctggccaggaaggacgccaaggtgatcggcatggtgggcgccggccaccaggccaagttccagctgagggccgccctggagcagagggagttcgagaaggtgatcggctggaacttccaccccgagatgctgcccaacctggaggaggtggccagcgaggccggcctgcccttcgaggccgtggccctggagggcctgaccgaggccgacgtgatcatcagcatcaccagcagcttcgacgccatcctgcacgccgaccacgtggcccccggcacccacatcgcctgcatgggcaccgacaccaagggcaagcaggaggtggagaccgccctgctgggcaaggccaccgtgttcaccgacgaggtggcccagagcatcagcatcggcgaggcccagcacgccatcgagagccagatcctgagggccgaggacatcacccaggtgggcgccgtgatcaacggcacccaccccggcaggaccagcgacgaggagatcaccctgttcgacggcaccggcgtgggcctgcaggacctggccgtggccgccgccgtggtggacctggccgtggccaagggcctggccatcgaggtggacttc

SEQ ID NO: 206 - DNA, 963 bp, Labrenzia alexandrii DFL-11
atgatcatcgtgcccgagaaggagatcgccgccctgctgggcagggccgaggccttcgaggccgtggagagcgtgttcgccgccatgagcagcggcgtggcctacaacttccccgtgatcagggaggccatcggccacgccgacgccctgtacggcttcaagagcggcttcgacaggagcagcctggccctgggcctgaagagcggcggctactggcccggcaacgccgacaagggcctgaccaaccaccagagcaccgtgttcctgttcgacgccgacaccggcaaggccaaggccgtggtgggcggcaacctgctgaccgccctgaggaccgccgccgccagcgccgtgagcatcaagcacctggccaggaagcacgccaaggtgctgggcatgatcggcgccggccaccagagcgccttccagatgagggccgccgtggagcagaggagcttcgagaaggtgatcggctggaacctgcaccccgagatgctgagcaggctggaggagaccgccgccgagctggacctgcccttcgaggccgtggacctggacaggctgggcgccgaggccgacgtgatcatcagcatcaccagcagcttcgaccccatcctgaaggtgagccaggtgacccccggcacccacctggcctgcatgggcaccgacaccaagggcaagcaggaggtggaggccgagctggtggccaaggccaccgtgttcaccgaccaggtggcccagagcagcaccatcggcgagtgccagtacgccgtggccagcggcctgatcagcgagagcgacatcaacgagatcggcgccgtgatcaacggcaaccacaagggcaggaccagcgtggacgagatcaccctgttcgacggcaccggcgtgggcctgcaggacctggccgtggccagcaaggtggtggacctggccgtggagaagggcatcgccatcagcgtggacttc

SEQ ID NO: 207 - DNA, 963 bp, Methylobacterium sp. 285MFTsu5.1
atgatcatcatcagcgagagggagatcgccaccctggtgagccccgccgactgcttcgccgccgtggagggcgtgttcgccagcatggccaagggcaaggcctacaacttccccgtggtgagggaggccatcggccacgccgacgccctgtacggcttcaagagcggcttcgacagggagagcctggccctgggcctgaagagcggcggcttctggcccggcaacgtggagaagggcctgaccaaccaccagagcaccatcttcctgttcgacgccgacaccggctgctgcagggccatcgtgggcggcaacctgctgaccgccctgaggaccgccgccagcagcgccctgagcatcaagtacctggccaggcccgaggccagggtgatcggcatgatcggcgccggccaccagagcaccttccagctgagcgccgccctggaccagaggaggttcgagaaggtggtgggctggaacatcgagcccagcgccctgggcaggctggagagcgtggccgtggagaggggcatccccttcgaggccgtggacctggacaggctgggcgccgaggccgacgtgatcatcaccatcaccagcagcttcgcccccatcctgaaggccgcccaggtgaggcccggcacccacctggcctgcatgggcaccgacaccaagggcaagcaggaggtggaggccgagctgctggccaaggccagcgtgttcaccgacgagatcgcccaggccaccagcatcggcgaggcccagcacgccgtggcccagggcctgctggccgccaccgacatcgtggccatcggcagcgtgatcaacggcgcccaccccggcaggaggagccccgaggacatcaccctgttcgacggcaccggcgtgggcctgcaggacctggccgtggccagcaccgccgtggacctggccatcgccaggggcgtggccagggagatcgacttc

SEQ ID NO: 208 - DNA, 963 bp, Methylobacterium sp. 285MFTsu5.1
atgatcatcgtgcccgagcacgccatcgacggcctgctgaccgaggccgagtgcttcaccgccgtggagcaggtgttcgccagcatggccaggaggagggccggcaacttccccgtggtgagggaggccatcggccacgccgacgccctgtacggcttcaagagcggcttcgacagggacagcctggccctgggcctgaaggccggcggcttctggcccggcaacgccgccaagggcctgaccaaccaccagagcaccgtgttcctgttcgacgccgacaccggcaggtgcagggccgtggtgggcggcaacctgctgaccgccctgaggaccgccgccgcctgcgccatcagcgtgaggcacctggccaggaaggacgccagggtgctgggcatgatcggcgccggccaccagagcgccttccagctgagggccgccctggcccagaggcccttcgagagggtgctggcctggaacctgcaccccggcatgttcggcaggatggaggccgtggccagggagcacggcgtggccttcgaggccgtggacctggacaggctgggcagcgaggccgacgtggtggtgaccatcaccagcagcttcgcccccatcctgaaggccgcccaggtgaggcccggcacccacctggcctgcatgggcaccgacaccaggggcaagcaggaggtggaggccgagctgctggccgccgccaccgtgtgcaccgacgaggtggcccagagcgtgagcatcggcgaggcccagcacgccgtggccaggggcctgctggccgccgacagcatcgtggagatcggcgccgtgatcaacggcgaccaccccggcagggtgagcgagagcgagatcaccctgttcgacggcaccggcgtgggcctgcaggacctggccgtggccgccgtggccgtggacagggccgtggccaagggcctggccaccgaggtggacgtg

SEQ ID NO: 209 - DNA, 963 bp, Methylobacterium sp. EUR3 AL-11
atgatcatcgtgcccgagcacgccatcgacggcctgctgaccgaggccgagtgcttcaccgccgtggagcaggtgttcgccagcatggccaggaggagggccggcaacttccccgtggtgagggaggccatcggccacgccgacgccctgtacggcttcaagagcggcttcgacagggacagcctggccctgggcctgaaggccggcggcttctggcccggcaacgccgccaagggcctgaccaaccaccagagcaccgtgttcctgttcgacgccgacaccggcaggtgcaaggccgtggtgggcggcaacctgctgaccgccctgaggaccgccgccgcctgcgccatcagcgtgaggcacctggccaggaaggacgccagggtgctgggcatgatcggcgccggccaccagagcgccttccagctgagggccgccctggcccagaggcccttcgagagggtgctggcctggaacctgcaccccggcatgttcggcaggatggaggccgtggccagggagaggggcgtgcccttcgaggtggtggacctggacaggctgggcgccgaggccgacgtggtggtgaccatcaccagcagcttcgcccccatcctgaaggccgcccaggtgaggcccggcacccacgtggcctgcatgggcaccgacaccaggggcaagcaggaggtggaggccgagctgctggccgccgccaccgtgttcaccgacgaggtggcccagagcgtgagcctgggcgaggcccagcacgccgtggccaggggcctgctggccgccgacagcatcgtggagatcggcgccgtgatcaacggcgaccaccccggcagggtgagcgacgccgagatcaccgtgttcgacggcaccggcgtgggcctgcaggacctggccgtggccgccgtggccgtggacagggccgtggccaagggcctggccaccgaggtggacttc

SEQ ID NO: 210 - DNA, 960 bp, Paracoccus yeei ATCC BAA-599
atgctggtggtggccgagaaggagatcggcggcctgatgacccccgaggccgccttcgaggccatcgaggccgtgttcgccgccatggacgccggcaaggcctacaacttccccgtggtgagggaggccatcggccacgaggacgccctgtacggcttcaagggcggcttcgacgccagcgccctgaccctgggcctgaaggccggcggctactggcccaacaaccagaagcacgacctgatcaaccaccagagcaccatcttcctgttcgacgccgacaccggcagggtggccgccgccgtgggcggcaacctgctgaccgccctgaggaccgccgccgccagcgccgtgagcatcaagtacctggcccccaagggcgccagggtgctgggcatgatcggcgccggccaccagagcgccttccagatgagggccgccgccagggtgcacgccttcgagaaggtgatcggctggaacccccaccccgagatgctgaccaggctggccgagaccgccgccgagctgggcctgcccttcgaggccgtggacctggacaggctgggcgccgaggccgacgtgatcgtgagcatcaccagcagcttcagccccctgctgatgaacgagcacgtgaggggcgagacccacatcgccgccatgggcaccgacaccaagggcaagcaggagctggaccccgccctggtggccagggccaagctgtacaccgacgaggtggcccaggccgtgagcatcggcgagtgccagcacgccgtggcccagggcctggtggaggccgccgccatcaccaggctgggcgccgccgtgaacggcaccgaccccggcagggacggcgccgagatcaccctgttcgacggcaccggcgtgggcctgcaggacctggccgtggccgccaaggtggtgcagctggcccaggccaagggcatcgcccagaccgtggagatc

SEQ ID NO: 211 - DNA, 963 bp, Defluviimonas sp. 20V17; identical to SEQ ID NO: 27

SEQ ID NO: 212 - DNA, 963 bp, Sphingomonas sp. DC-6
atgatcatcgtgcccgagagggagatcgccggcctgatcagcgccagcgactgcttcaccgccgtggagcaggtgttcgccagcatggccaagaagagcgcctacaacttccccgtgatcagggaggccatcggccacgccgacgccctgtacggcttcaagagcggcttcgacagggagagcctggccctgggcctgaagagcggcggcttctggcccaacaacatggccaagggcctgaccaaccaccagagcaccgtgttcctgttcgacgccgacaccggcaagtgcaaggccgtggtgggcggcaacctgctgaccgccctgaggaccgccgccgccagcgccgtgagcatcaagtacctggccaggcccgacagcaaggtgctgggcatgatcggcgccggccaccagagcaccttccagctgagggccgccctggagcagaggcccttcgagaaggtgatcggctggaacctgcacagggaggccctgagcaggctggaggccgtggccgccgagaagggcctgcccttcgaggccgtggacctggacaggctgggcgccgaggccgacgtgatcatcaccatcaccagcagcttcgaccccatcctggaggccgcccaggtgaggcccggcgcccacctggcctgcatgggcaccgacaccaagggcaagcaggaggtggacgccgagctggtggccgccagcaccgtgttcaccgacgagatcgcccagagcatcaccatcggcgaggcccagcacgccgtggccgagggcctgatcgccgccgagagcatcatcgagatcggcgccgtgatcaacggcagccaccccggcaggaccagcgagagggagatcaccctgttcgacggcaccggcgtgggcctgcaggacctggccgtggccagcgccgccgccgacctggccgtgagcaagggcgtggccatcgaggtggacttc

SEQ ID NO: 213 - DNA, 996 bp, AP Rhodobacteraceae bacterium bin18
atggccgacggcgccagcgcccccgccaacgagctggtgatcgtgcccgagggcatgatccccgacatcctgaccagggaggccagcttcgacgccgtggagaaggtgttcgccgccatggccgccggcgaggccaggaacttccccgtggtgagggaggccatcggccacgaggacgccctgtacggcttcaagggcggcttcgacgccgtgggcggcgtgctgggcctgaaggccggcggctactggccccacaacctggacaggaggggcatcatcaaccaccagagcaccgtgttcctgttcgaccccgacaccggcagggtgaaggccctggtgggcggcaactacctgaccgccctgaggaccgccgccgccagcagcgtgagcatcaggcacctggccaggaaggacgccaaggtgctgggcatgatcggcgccggccaccaggccaagttccagctgagggccgccgccgagacccacgccttcgagaaggtgatcggctggaacctgcaccccgagatgctgcccggcctggccgaggtggccagggaggtgggcctgcccttcgaggccgtggagctgcccggcatgagcgaggccgacgtgatcatcaccatcaccagcagcttcgcccccaccctgctggccgaccacgtgagccccggcacccacctggcctgcatgggcaccgacaccaagggcaagcaggaggtggaggccgccctgctgggcagggccagggtgttctgcgacgaggtggcccagagcgtgagcatcggcgaggcccagcacgccgtggccgagggcctgctgagcgagggcgacgtgacccagctgggcgccgtgatcaacggcacccacggcggcaggggcagcgacgaggagatcaccctgttcgacggcaccggcgtgggcctgcaggacctggccgtggccgacgccatcgtgaagaccgccgtggcccagggcatcgccaccatcgtgcccctg

SEQ ID NO: 214 - DNA, 960 bp, Paracoccus sulfuroxidans CGMCC 1.5364
atgtacgtggtgcccgagaaggagatcgccggcctgatgacccccgacgccgccttcgaggccatcgaggccgtgttcgccagcatggccaggaggaaggcctacaacttccccgtggtgagggaggccatcggctacgaggacgccctgtacggcttcaagggcggcttcgacgccgccggcctgagcctgggcctgaaggccggcggctactggcccaacaaccagaagcacaacctgatcaaccaccagagcaccgtgttcctgttcgaccccgacaccggcagggtgagcgccgccgtgggcggcaacctgctgaccgccctgaggaccgccgccgccagcgccgtgagcatcaagtacctggcccccaagggcgccaaggtgctgggcatgatcggcgccggccaccagagcgccttccagatgagggccgccgccagggtgcacaacttcgagaaggtgatcggctggaacccccaccccgagatgctgaccaggctggccgacaccgccgccgagctgggcctgcccttcgaggccgtggagctggacaggctgggcagcgaggccgacgtgatcatcagcatcaccagcgccttcagccccctgctgatggacagccacgtgaagggccccacccacatcgccgccatgggcaccgacaccaagggcaagcaggagctggacgccgccctggtggccagggccagggtgttcaccgacgaggtggcccagagcatcagcatcggcgaggcccagcacgccatcgcccagggcctgatcgccgaggaggccatcaacgagctgggcgccgtggtgaccggcgaccacgagggcaggggcgacgccgaggtgaccatcttcgacggcaccggcgtgggcctgcaggacctggccgtggcccacaagagcgtggagatcgccaagcagaagggcgtggccctgaccgtggagatc

SEQ ID NO: 215 - DNA, 990 bp, Marinobacterium sp. AK27
atgagcaccagcgtgaacggcgccggcgtggccatcgtgagcgaggccgtgtgcgagcagatcgtgggcaggcccgaggccttcaaggccgtggagagcgtgttcggcgccatggccaggggcgacgcctacaacttccccgtggtgagggaggccatcggccacgccgacgccctgtacggcttcaagagcggcttcgacagggccggcatggtgctgggcgtgaagagcggcggctactggcccggcaacgtgcagaaggacctgaccaaccaccagagcaccgtgatcctgttcgaccccgacaccggcaggctgaaggccctggtgggcggcaactacctgaccgccgtgaggaccgccgccgccagcgccgtgagcatcgcctacctggccaggaaggacgccaaggtgctgggcatggtgggcgccggccaccagagcaccttccagctgagggccgccctggagcagagggccttcgagaaggtggtggcctggaacccccaccccgagtacctgagcaggctggccgccgtgtgcgacgagctgagggtgcccttcgaggccgtggaccagcagcagctgggcgcccaggccgacgtgatcatcaccatcaccagcgccttcgagcccctgatgatgaaggagtggatcaagcccggcacccacatcgcctgcatgggcaccgacaccaagggcaagcaggaggtggaccccgagctgctggccgccgccaccctgttcaccgacgaggtggcccagagcatcagcatcggcgaggcccagcacgccgtggccagcggcctgatcagcgagagcgacatcacccccatcggcgaggtgatcaacggcacccaccccggcaggagggacgaccaggagatcaccctgttcgacggcaccggcgtgggcctgcaggacctggccgtggccagcgccgccgccaacctggccctggagcagggcctggccctgaggatcgccctg

SEQ ID NO: 216 - DNA, 963 bp, Yangia pacifica DSM 26894
atgctgatcgtgcccgagagggagatcgccgacctgatgaccagggaggccgccttcgccgccgtggagaaggtgttcgccgccatggccgccggcgacgcctacaacttccccgtggtgagggaggccatcggccacgaggacgccctgtacggcttcaagggcggcttcgacaggagcggcctgaccctgggcctgaaggccggcggctactggcccaacaacctggagaagaggggcatcatcaaccaccagagcaccgtgttcctgttcgaccccgacaccggcaaggccagggccatggtgggcggcaacctgctgaccgccctgaggaccgccgccgccagcagcgtgagcatcaggcacctggccagggaggacgccagggtgatcggcatggtgggcgccggccaccaggccaccttccagctgagggccgccctggagcagagggacttcgacaaggtgatcggctggaacctgcaccccgagatgctgcccaacctggagaaggtggccgccgaggccggcgtgcccttcgaggccgtggagctgaccggcatgagggaggccgacgtgatcatcagcatcaccagcagcttcgacgccatcctgatggccgagcacgtgagccccggctgccacatcgcctgcatgggcaccgacaccaagggcaagcaggaggtgagccccgccctgctggccaaggccaccgtgttcaccgacgaggtggcccagagcgtgagcatcggcgaggcccagcacgccgtggcccagggcctgatcgacgagagcgccatcacccagctgggcgccgtgatcaacggcgcccaccccggcaggaggagcgccgaggagatcaccctgttcgacggcaccggcgtgggcctgcaggacctggccgtggccgccgccgtggtggacctggccgtggagaagggcatcgccatcgaggtggacttc

SEQ ID NO: 217 - DNA, 963 bp, Shimia haliotis DSM 28453
atgctgatcgtgcccgagagggagatcgccgacctgatgaccagggacgccgccttcgacgccgtggagaaggtgttcgccgccatggccagcggcgacgcctacaacttccccgtggtgagggaggccatcggccacgaggacgccctgtacggcttcaagggcggcttcgaccaggccggcctgaccctgggcctgaaggccggcggctactggcccaacaacctggagaagaggggcctgatcaaccaccagagcaccgtgttcctgttcgaccccgacaccggcaaggccaaggccatggtgggcggcaacctgctgaccgccctgaggaccgccgccgccagcagcgtgagcatcaagcacctggccaggagcgacagcaaggtgatcggcatggtgggcgccggccaccaggccaccttccagctgagggccgccctggagcagaggaacttcgagaaggtgatcggctggaactaccaccccgagatgctgcccaacatcgagaaggtggccaacgaggccggcctgcccttcgaggccgtggacctgcccggcctgaccgaggccgacgtgatcatcagcatcaccagcgccttcgcccccagcgtgatggccgagcacatcagcgagggcacccacatcgcctgcatgggcaccgacaccaagggcaagcaggaggtggaggccgccctgctggtgaaggccgacgtgttcaccgacgaggtggcccagagcatcagcatcggcgaggcccagcacgccgtggcccagggcctgatcaaggagaccgacgtggcccagctgggcgccgtgatcaacggcaccatcgccggcaggaccagcgacgaccagatcaccctgttcgacggcaccggcgtgggcctgcaggacctggccgtggccgccagcgtggtggacctggccgtggagaagggcatcgccatcgaggtggacttc

SEQ ID NO: 218 - DNA, 966 bp, Hasllibacter halocynthiae DSM 29318
atgatcatcgtgcccgaggccgccatcgccgacctggtggacagggccgccgccttcgacgccgtggaggccaccttcgccgccatggccagcggcgacgccaggaacttccccgtggtgagggaggccctgcccggccccgaggaggccctgtacggcttcaagggcggcgtggacgccagcgccgaggccctgggcctgaaggccggcggctactggccccacaacctggagaggaggggcctgatcaaccaccagagcaccgtgttcctgttcgaccccgagaccggcaggcccaccgccatggtgggcggcaacctgctgaccgccctgaggaccgccgccgccagcagcgtgagcatcaggcacctggccagggaggacgccagggtgatcggcatggtgggcgccggccaccaggccggcttccagctgagggccgccctggagcagaggcccttcgagaaggtgatcggctggaacctgcaccccgagatgctgcccaacctggagaaggtggccgccgaggccggcctgcccttcgaggccgtggagctggagggcctgagggccgccgacgtgatcgtgaccatcaccagcagcttcgcccccaccctgatggccggccacgtgggccccggcgcccacgtggcctgcatgggcaccgacaccgtgggcaagcaggaggtggaccccgagctgctgaagctggccaccgtgttcgccgacgaggtggcccagagcgtgaccctgggcgaggcccagcacgccgtgggcgccggcaccatcgccgagggcgacctgacccccatcggcgacgtgatcaggggcgtgcaccccggcaggaccagccaggaggagatcaccctgttcgacggcaccggcgtgggcctgcaggacctggccgtggccgccgccgccgtgaggctggcccaggagaagggcgtggccgtggaggtggagatc

SEQ ID NO: 219 - DNA, 963 bp, Oceanicola nitratireducens DSM 29619; identical to SEQ ID NO: 104

SEQ ID NO: 220 - DNA, 963 bp, Ruegeria halocynthiae DSM 27839
atgatcatcgtgcccgagaaggagatcggcgccctgctgggcaggaaggagagctacgaggccatcgagcaggtgttcgccgccatggccagcggcaacgcctacaacttccccgtggtgagggaggccatcggccacgccgacgccctgtacggcttcaagggcggcttcgaccaggccggcatgaccctgggcctgaaggccggcggctactggcccaacaacctggagacccacggcctgatcaaccaccagagcaccgtgttcctgttcgaccccgacaccggcagggtgaaggccgtggtgggcggcaacctgctgaccgccctgaggaccgccgccgccagcagcgtgagcatcaactacctggccaggaaggacgccaaggtgatcggcatggtgggcgccggccaccaggccaagttccagctgagggccgccctggagcagaggaacttcgagaaggtgatcggctggaacctgcaccccgagatgctgcccaacctggaggaggtggccgccgaggccggcctgcccttcgaggccgtggagctgagcggcatgaccgaggccgacgtgatcatcaccatcaccagcagcttcgcccccaccctgatgagcgaccacgtgagcgacggcacccacatcgcctgcatgggcaccgacaccatcggcaagcaggaggtgggcgtggacctgatcgccagggccagcgtgttcgccgacgagatcgcccagagcatcaccctgggcgagtgccagcacgccatcgccaacggcagcaaggccgaggccgacatcaggcaggtgggcgaggtgatcaacagcacccaccagggcaggaccagcgacgacgaggtgaccctgttcgacggcaccggcgtgggcctgcaggacctggccgtggccagcgccgtggtggacctggccgtggagcagggcatcgccatcaaggtggacttc

SEQ ID NO: 221 - DNA, 1002 bp, Citreimonas salinaria DSM 26880
atgaacgcccccgacaagaccgccaccgccgccaacatggtgaccatcgtgcccgagagcgagatcggcggcctgatggacgccgccagcgccttcgacgccgtggaggccaccttcgccgccatggccaggggcgacgcctacaacttccccgtgatcagggaggccatcggccacgccgacgccctgtacggcttcaagagcggcttcgacaaggccgccctggccctgggcctgaagagcggcggctactggcccggcaacgaggccaggggcctgaccaaccaccagagcaccgtgatcctgttcgacgccgacaccggcagggtgaaggccctggtgggcggcaacctgctgaccgccctgaggaccgccgccgccagcgccgtgagcatcgcccacctgagcaggaaggacagcaaggtgctgggcatggtgggcgccggccaccagagcgccttccagatgagggccgcctgcgcccagagggacttcgacaaggtggtgggctggaactaccaccccgagatgctgagcaggctggaggacaccgccaaggagctgggcctgcccttcgaggccgtggagagggaggacctgtgcgcccaggccgacgtgatcatcaccatcaccagcagccacgacgcccagctgatggccgactgggtgaagcccggcacccacgtggcctgcatgggcaccgacaccaagggcaagcaggaggtggaccccgccctgctggccagggccagcgtgttcaccgacgaggtggcccagagcgtgaccctgggcgaggcccagcacgccgtggcccagggcctgatcaaggaggccgacatcacccccatcggcgccgtgatcgagggcaccgccaagggcaggaccagcgacgaccaggtgaccctgttcgacggcaccggcgtgggcctgcaggacctggccgtggccgccaaggtggtggacctggccctgaaggccggcaaggcccagcaggtgcccttc

SEQ ID NO: 222 - DNA, 963 bp, Ruegeria mobilis S1942
atgtacatcgtgcccgagagggccatcgccgacctgatgaccagggacgccgccttcgacgccgtggagaagatcttcgccgccatggccgccggcgacgcctacaacttccccgtggtgagggaggccatcggccacgaggacgccctgtacggcttcaagggcggcttcgacagcgccggcctgagcctgggcctgaaggccggcggctactggcccaacaacctggagaagaggggcctgatcaaccaccagagcaccgtgttcctgttcgaccccgacaccggcaaggtgagggccatggtgggcggcaacctgctgaccgccctgaggaccgccgccgccagcagcgtgagcatcaagcacctggccagggaggacgccaaggtgatcggcatgatcggcgccggccaccaggccaagttccagctgagggccgccctggagcagagggacttcgacaaggtgatcggctggaacctgcaccccgagatgctgcccaacctgaaggaggtggccaccgaggccggcctgcccttcgaggccgtggagctggacggcctgaaggaggccgacgtgatcatcagcatcaccagcagcttcgacgccatcctgaaggccgaccaggtgagccccggcacccacatcgcctgcatgggcaccgacaccaagggcaagcaggaggtggacccccagctgctggtgagggccaccgtgttcaccgacgaggtggcccagagcatcagcatcggcgaggcccagcacgccgtggcccagggcctgatcaccgaggccgacgtggcccagctgggcgccgtgatcaacggcgcccaccccggcaggagcagcgccgagcagatcaccctgttcgacggcaccggcgtgggcctgcaggacctggccgtggccgccagcgtggtggagctggccgtgaagaagggcgtggccatcgaggtggacttc

SEQ ID NO: 223 - DNA, 963 bp, Leisingera aquaemixtae CECT 8399
atgtacatcgtgcccgagaaggccgtggccgacctggtgaccagggaggccagcttcgacgccgtggagaaggtgttcgccgccatggccagcggcgacgcctacaacttccccgtggtgagggaggccatcggccacgaggacgccctgtacggcttcaagggcggcttcgacagggccggcctgaccctgggcctgaaggccggcggctactggcccaacaacctggagaagaggggcctgatcaaccaccagagcaccgtgttcctgttcgaccccgacaccggcaaggtgaaggccatggtgggcggcaacctgctgaccgccctgaggaccgccgccgccagcagcgtgagcatcaagcacctggccaggcaggacgccaaggtgatcggcatgatcggcgccggccaccaggccaagttccagctgagggccgccctggagcagaggaacttcgagaaggtgatcggctggaacttccaccccgacatgctgcccaacatcgagaaggtggccgccgaggccggcgtgcccttcgaggccgtggacctgcccggcatgagggacgccgacgtgatcatcagcatcaccagcgccttcgcccccagcctgatggccgaccacgtgagccccggcacccacgtggcctgcatgggcaccgacaccaagggcaagcaggaggtggaggccgccctgctggtgaagagcaccgtgttcaccgacgaggtggcccagagcatcaccatcggcgaggcccagcacgccgtggcccagggcctgatccaggagagcgacgtggcccagctgggcgccgtgatcaacggcaccaaccccggcaggaccagcgacgaccagatcaccctgttcgacggcaccggcgtgggcctgcaggacctggccgtggccgccagcgtggtggaggtggccgtggagaagggcatcgccatcgaggtggacttc

SEQ ID NO: 224 - DNA, 963 bp, Leisingera aquaemixtae CECT 8399; identical to SEQ ID NO: 223

SEQ ID NO: 225 - DNA, 960 bp, Paracoccus halophilus JCM 14014; identical to SEQ ID NO: 98

SEQ ID NO: 226 - DNA, 963 bp, Ruegeria sp. ZGT118
atgctgatcgtgcccgagagggagatcgccgacctgatgaccagggaggccgccttcgacgccgtggagcaggtgttcgccagcatggccagcggcgacgcctacaacttccccgtggtgagggaggccatcggccacgaggacgccctgtacggcttcaagggcggcttcgacagggccggcctgaccctgggcctgaaggccggcggctactggcccaacaacctggagaagcacggcctgatcaaccaccagagcaccgtgttcctgttcgaccccgacaccggcaggcccaccgccatggtgggcggcaacctgctgaccgccctgaggaccgccgccgccagcagcgtgagcatcaagcacctggccaggaccgacgccaagatcctgggcatgatcggcgccggccaccaggccgccttccagctgagggccgccctggagcagaggaacttcgagaaggtgatcggctggaactaccaccccgagatgctgcccaacatcgagaaggtggccgccgaggccggcatccccttcgaggccgtgcccctggacggcatgaggcaggccgacgtgatcatcagcatcaccagcgccttcgcccccagcctgatggccgaccacgtgagcgccggcacccacgtggcctgcatgggcaccgacaccaagggcaagcaggaggtggagagcgccctgctggccggcgccggcgtgttcaccgacgaggtggcccagagcgtgaccatcggcgaggcccagcacgccgtggccgagggcctgatcaaggagagcgacgtggcccagctgggcgccgtgatcaacggcacccaccccggcaggagcagcgacgaccagatcaccctgttcgacggcaccggcgtgggcctgcaggacctggccgtggccgccagcgtggtggagctggccgtgaggaagggcatcgccatcgaggtggacttc

SEQ ID NO: 227 - DNA, 978 bp, Ruegeria faecimaris DSM 28009
atgaagagcgacggcctgctgatcgtgggcgaggacctgtgcgagaagctggtgggcaggcagcaggccttcgacgccgtgcaggccgtgttcggcgccatggccaagggcggcgcctggaacttccccgtgatcagggaggccctgggccacgccgacgtgctgtacggcttcaagagcggcttcgacagggacggccaggtgctgggcctgaagagcggcggctactggcccggcaacgccgccaagggcctgaccaaccaccagagcaccgtgttcctgttcgaccccgacaccggcaggctgagcgccctggtgggcggcaactacctgaccgccgtgaggaccgccgccagcagcgccgtgagcatcgcccacctggccaggcaggacgccagggtgctgggcatggtgggcgccggccaccagagcaccttccagctgagggccgccgccgagcagagggacttcgagaaggtgatcgcctggaacccccaccccgacatgctgcccaggctggccgccgtggccaccgaggtgggcctggagttcgaggccgtgagccagcaggagctgggcgcccaggccgacgtgatcatcaccatcaccagcgccttcgagcccctgctgatgaaggactggatcaagcccggcacccacctggcctgcatgggcaccgacaccaagggcaagcaggaggtggacgccgacctggtggccgccgccaccgtgttcaccgacgaggtggcccagagcgtgaccatcggcgaggcccagcacgccatcaacctgggcgccctgaccgaggacgccatcgcccccatcggcgccgtgatcaacggcgaccaccccggcaggaccagcgacgaccagatcaccctgttcgacggcaccggcgtgggcctgcaggacctggccgtggccagcgtggccgccaggctggccgaggaggccgacctggcccagagggccaccctg

SEQ ID NO: 228 - DNA, 963 bp, Shimia sagamensis DSM 29734
atgctgatcgtgcccgagagggagatcgccgacctgatgaccagggaggccgccttcgacgccgtggagaaggtgttcgccgccatggccgccagggacgcctacaacttccccgtggtgagggaggccatcggccacgaggacgccctgtacggcttcaagggcggcttcgaccaggccggcctgaccctgggcctgaaggccggcggctactggcccaacaacctggagaagagggacctgatcaaccaccagagcaccgtgttcctgttcgaccccgacaccggcaaggccaaggccatggtgggcggcaacctgctgaccgccctgaggaccgccgccgccagcagcgtgagcatcaagcacctggccagggacgacgccaaggtgatcggcatgatcggcgccggccaccaggccaccttccagctgagggccgccctggagcagaggcagttcgagaaggtgatcggctggaactaccaccccgagatgctgcccaacatcgagaaggtggccaccgaggccggcctgcccttcgaggccgtgaagctggacggcatgaaggaggccgacgtgatcatcagcatcaccagcgccttcgcccccagcctgatggccgaccacgtggcccccggcacccacatcgcctgcatgggcaccgacaccaagggcaagcaggaggtggagagcgccctgctggccaaggccagcgtgttcaccgacgaggtggcccagagcatcagcatcggcgaggcccagcacgccgtggccgagggcctgatcaaggagagcgacgtgggcgagatcggcgccgtgatcaacggcaccaaccccggcaggaccagcgccgaccagatcaccctgttcgacggcaccggcgtgggcctgcaggacctggccgtggccgccgccgtggtggacctggccgtggagaagggcatcgccatcgaggtggacttc

SEQ ID NO: 229 - DNA, 963 bp, Sulfitobacter sp. HI0027; identical to SEQ ID NO: 195

SEQ ID NO: 230 - DNA, 999 bp, Psychrobacter cryohalolentis K5
atgagcgaggccaacagcgtgaacagcgacgagggcctgctgatcgtgagcgaggacgcctgcaagagcgtgatcgacaggcccagcgccttcatcgccgtggagaacgtgttcgccagcatgagcaggggcgacgcctacaacttccccgtgatcagggaggccatcggctacgccgacgccctgtacggcttcaagagcggcttcgacagggccggcaagagcctgggcctgaagagcggcggctactggcccggcaacgccgccaagggcctgaccaaccaccagagcaccatcttcctgttcaaccccgacaacggcaagctgagggccctggtgggcggcaactacctgaccgccgtgaggaccgccgccgccagcgccgtgagcatcgcccacctggccaggaaggacagcaaggtgctgggcatggtgggcgccggccaccagagcaccttccagctgagggccgccctggagcagaggaacttcgagaaggtggtggcctggaacaagaacaaggacaggctgaagaacctgcaggccgtggccgaggagctgggcgtgcccttcgaggccgtggagagggagcagctgtgcagcgaggccgacgtgatcatcaccatcaccagcgccttcgagcccctgctgatgaaggagtggatcaagcccggcacccacatcgcctgcatgggcaccgacaccgtgggcaagcaggaggtggacgtgaacctgatcgccgccgccaccgtgttcaccgacgagatcacccagagcatcagcctgggcgagacccagcacgccatcaagagcggcgccatcaaggagagcgacatcaccaccctgggcgacgtgatcaacggcgagcaccccggcaggagcagcgacgacgagatcaccctgttcgacggcaccggcgtgggcctgcaggacctggccgtggccagcgccgccaccaagctggccctggagaagggcgaggcccagcacatcagcctg

SEQ ID NO: 231 - DNA, 963 bp, Rhodobacterales bacterium Y4I scf_1106129324775 genomic scaffold
atgtacatcgtgcccgagaaggccgtggccgacctggtgaccagggaggccagcttcgacgccgtggagaaggtgttcgccgccatggccagcggcgacgcctacaacttccccgtggtgagggaggccatcggccacgaggacgccctgtacggcttcaagggcggcttcgacagggccggcctgaccctgggcctgaaggccggcggctactggcccaacaacctggagaagaggggcctgatcaaccaccagagcaccgtgttcctgttcgaccccgacaccggcaaggtgaaggccatggtgggcggcaacctgctgaccgccctgaggaccgccgccgccagcagcgtgagcatcaagcacctggccaggcaggacgccaaggtgatcggcatgatcggcgccggccaccaggccaccttccagctgagggccgccctggagcagaggcccttcgagaaggtgatcggctggaactaccaccccgagatgctgcccaacatcgagaaggtggccgccgaggccggcgtgcccttcgaggccgtggacctgcccggcatggccgacgccgacgtgatcatcagcatcaccagcgccttcgcccccagcctgatggccgaccacgtgagccccggcacccacatcgcctgcatgggcaccgacaccaagggcaagcaggaggtggaggccgagctgctggtgaaggccaccgtgttcaccgacgaggtggcccagagcatcagcatcggcgaggcccagcacgccgtggcccagggcctgatccaggagagcgacgtggcccagatcggcgccgtgatcaacggcaccaaccccggcaggaccagcgacgaccagatcaccctgttcgacggcaccggcgtgggcctgcaggacctggccgtggccgccagcgtggtggaggtggccgtggagaagggcatcgccatcgaggtggacttc

SEQ ID NO: 232 - DNA, 990 bp, Colwellia sp MT41
atgagcgacagccagatcaacaagggcgtgagcgtgatcagcgaggaggtgtgccagcaggtgatgggcagggccaacgccttcaccgccgtggagaacgtgttcagcgccatggccaagaagaccgcctacaacttccccgtgatcagggaggccatcggccacgccgacgccctgtacggcttcaagagcggcttcgacagggacggcatggtgctgggcctgaagagcggcggctactggcccagcaacatggccaagggcctgaccaaccaccagagcaccgtgatcctgttcgaccccgacaccggcaagctgaagagcctggtgggcggcaactacctgaccgccgtgaggaccgccgccagcagcgccatcagcatcgcctacctggccaggaaggacgccaaggtgctgggcatgatcggcgccggccaccagagcaccttccagctgagggccgccgtggagcagaggaacttcgagaaggtggtgtgctggaacctgcaccccgagcacatcagcaacctggccgccgtggccgaggagctgggcctgcccttcgagagcgtgaccagggaggagctgtgcgcccaggccgacgtgatcatcaccatcaccagcgccttcgaggccctgatcgagaaggactggatcaagcccggcacccacatcgcctgcatgggcaccgacaccaagggcaagcaggaggtggacgccaagctgctgaccgtggccaaggtgttcaccgacgagctggcccagagcatcaccatcggcgaggcccagcacgccatcgccaggaagctgatccagcagagcgacatcgtgcccatcggcgaggtgatcaacggcaccaagcccggcaggaccagcgccgaggacatcaccctgttcgacggcaccggcgtgggcctgcaggacctggccgtggccagcctggccgccgagctggccgaggccaagggcctggccacctacttcaagctg

SEQ ID NO: 233 - DNA, 963 bp, cNanh_4411
atgatcatcgtgcccgagagggagatcgccaacctgatgaccagggaggccgccttcgtggccgtggagcaggtgttcgccgccatggccgcccaggacgcctacaacttccccgtgatcagggaggccatcggccacgaggacgccctgtacggcttcaagggcggcttcgacagggccggcaagaccctgggcctgaaggccggcggctactggcccaacaacctggacaagcaccagatcatcaaccaccagagcaccgtgttcctgttcgaccccgacaccggcaaggccaaggccatggtgggcggcaacctgctgaccgccctgaggaccgccgccgccagcagcgtgagcatcaagcacctggccaggaaggacgccagggtgatcggcatgatcggcgccggccaccaggccaccttccagctgagggccgccctggagcagaggcagttcgagaaggtgatcggctggaacttccaccccgagatgctgcccaacctggagaaggtggccgacgaggccggcctgcccttccaggccgtggacctgaacggcctgagggacgccgacgtgctgatcagcatcaccagcagcttcgaggccatcctgcaggccgaccaggtgagccccggcacccacatcgcctgcatgggcaccgacaccaagggcaagcaggaggtggaccccgccctgctgaccagggccaccgtgttcagcgacgaggtggcccagagcatcagcatcggcgaggcccagcacgccatcgccatggagctgatcaccgagcacgacatcacccagatcggcgccgtgatcaacggcacccaccccggcaggaccagcgacgaccagatcaccctgttcgacggcaccggcgtgggcctgcaggacctggccgtggccgccagcgtggtggacctggccgtggccaacggcgtggccatcgaggtggacttc

SEQ ID NO: 234 - DNA, 963 bp, Methylobacterium mesophilicum SR1.6/6
atgatcatcgtgcccgagcacgccatcgacggcctgctgaccgaggccgagtgcttcggcgccgtggagcaggtgttcgccagcatggccaggaggagggccggcaacttccccgtggtgagggaggccatcggccacgccgacgccctgtacggcttcaagagcggcttcgacagggacagcctggccctgggcctgaaggccggcggcttctggcccggcaacgccgccaagggcctgaccaaccaccagagcaccgtgttcctgttcgacgccgacaccggcaggtgcaaggccgtggtgggcggcaacctgctgaccgccctgaggaccgccgccgcctgcgccatcagcgtgaggcacctggccagggaggacgccagggtgctgggcatgatcggcgccggccaccagagcgccttccagctgagggccgccctggcccagaggcccttcgacagggtgctggcctggaacctgcaccccggcatgttcggcaggatggaggccgtggccagggagcacggcgtgcccttcgaggccgtggagctggacaggctgggcgccgaggccgacgtgatcgtgaccatcaccagcagcttcgccgccatcctgaaggccgcccaggtgaggcccggcacccacgtggcctgcatgggcaccgacaccaggggcaagcaggaggtggaggccgagctgctggccgccgccaccgtgttcaccgacgaggtggcccagagcgtgagcatcggcgaggcccagcacgccgtggccaggggcctgctggccgccgacagcatcgtggagatcggcgccgtgatcaacggcgaccaccccggcaggatcagcgagagcgagatcaccgtgttcgacggcaccggcgtgggcctgcaggacctggccgtggccgccgtggccgtggacagggccgtggccaagggcctggccaccgaggtggacttc

SEQ ID NO: 235 - DNA, 963 bp, Methylobacterium sp. B34; identical to SEQ ID NO: 208

SEQ ID NO: 236 - DNA, 963 bp, Roseivivax halodurans JCM 10272
atgatcatcgtgcccgagaaggacatcgccgacctgatgaccagggaggccgccttcgccgccgtggagcaggtgttcgccgccatggccagcggcgacgcctacaacttccccgtggtgagggaggccatcggccacgccgacgccctgtacggcttcaagggcggcttcgacaggctgggcggcgtgctgggcctgaaggccggcggctactggccccacaacctggagacccacggcatcatcaaccaccagagcaccgtgttcctgttcgaccccgacaccggcagggtggccgccatggtgggcggcaacctgctgaccgccctgaggaccgccgccgccagcagcgtgagcatcaggcacctggccagggaggacgccgaggtgctgggcatgatcggcgccggccaccaggccgccttccagctgagggccgccctggagcacaggagcttcggcaaggtggtgggctggaactaccaccccgagatgctgcccaacctggagaaggtggccgccgaggccggcgtggccttcgaggccgtggacctgcccggcatgagggaggccgacgtgatcgtgaccatcaccagcagcttcgacgccaccctgatggccgagcacgtggcccccggcacccacgtggcctgcatgggcaccgacaccaagggcaagcaggaggtggaccccgccctgctggccgccgccaccgtgttcgccgacgagatcgcccagagcgtgagcatcggcgaggcccagcacgccgtgagcgccggcctgatcagcgagagcgacatcgccgagctgggcgccgtgatcaacggcagccaccccggcaggaggagcgacgaggagatcaccctgttcgacggcaccggcgtgggcctgcaggacctggccgtggccgccgccgtggtggccctggccagggccaacgacaccgccatcgaggtggaggtg

SEQ ID NO: 237 - DNA, 1014 bp, Pelagicola litoralis DSM 18290
atggccgccggcatcggctgcgccgccgtggcctacttcaaggagctgctgatgatcatcgtgcccgagcacgagatcagcggcctgatgaccaggcaggacagcttcgacgccgtggagaaggtgttcgccagcatggccagcggcgccgcctacaacttccccgtgatcagggaggccatcggccacgccgacgccctgtacggcttcaagagcggcttcgacagggccggcctgaacctgggcctgaagagcggcggctactggcccggcaacgccgacaagggcctgaccaaccaccagagcaccgtgttcctgttcgacgccgacaccggcaagtgcagggccatcgtgggcggcaacctgctgaccgccctgaggaccgccgccgccagcgccgtgagcatcaagtacctggcccccaagagcgccaaggtgctgggcatgatcggcgccggccaccagagcagcttccagctgagggccgccctggaccagagggccttcgagaaggtgatcggctggaacctgcaccccgagcacctgagcaggctggaggacgtggccaccgaggccggcctgcccttcgaggccgtggagctggaccagctgggccaggaggccgacaccatcatcaccatcaccagcagcttcgcccccatcctgaagaacgcccacgtgaccggcggcacccacatcgcctgcatgggcaccgacaccgtgggcaagcaggaggtggacgccgagctggtggccagggcccaggtgttcaccgacgaggtggcccagagcatcagcctgggcgagtgccagcacgccatgagcgccggcctgatcaggcaggagcagatcgcccagatcggcgacgtgatcaacggcacccacaccggcaggaccagcgagaacgacatcaccctgttcgacggcaccggcgtgggcctgcaggacctggccgtggccagcgccgtggtggagctggccgtggccaggggcgtggccatcgaggtggacttc

SEQ ID NO: 238 - DNA, 993 bp, Thalassobacter stenotrophicus DSM 16310
atggacggcagccccatgaagagccacgagatcatcatcgtgcccgaggccgagatcgccggcctgatgacccccgaggccgccttcgacgccgtggaggccatcttcggcgccatggccaggaaggacgcctacaacttccccgtgatcagggaggccatcggccacgccgacgccctgtacggcttcaagagcggcttcgacagggccggcggcgccctgggcctgaagagcggcggctactggcccggcaacgaggccaagggcctgaccaaccaccagagcaccgtgatcctgttcgacagggacaccggcaggcccaaggccatggtgggcggcaacctgctgaccgccctgaggaccgccgccgccagcgccgtgagcatcaagcacctggccagggccgacagcaaggtgctgggcatgatcggcgccggccaccagagcgccttccagatgagggccgccctggcccagaggcccttcgagaaggtgatcggctggaactaccaccccgagatgctgagcaggctggaggccgtggccaccgaggccggcctgcccttcgaggccgtggacctggacaggctgggcgccgaggccgacgtgatcatcagcatcaccagcagcttcgacgccatcctgcacgacgcccaggtgaccgccggcacccacgtggcctgcatgggcaccgacaccaagggcaagcaggaggtggaggccgccctggtggccagggccaccgtgttcaccgacgagatcgcccagagcaccaccatcggcgaggcccagcacgccatcgccagcggcctgatcaccgaggccgccatcaccgagatcggcgccgtgatcaacggcacccaccccggcaggaccagcgccgaggaggtgaccctgttcgacggcaccggcgtgggcctgcaggacctggccgtggccgaggccgtggtggacctggccctgaagaccggcgtggccaccagggtgcccttc

SEQ ID NO: 239 - DNA, 963 bp, Methylobacterium sp. UNC300MFChir4.1
atgatcatcgtgcccgagcacgccatcgacggcctgctgaccgaggccgagtgcttcaccgccgtggagcaggtgttcgccagcatggccaggaggagggccggcaacttccccgtggtgagggaggccatcggccacgccgacgccctgtacggcttcaagagcggcttcgacagggacagcctggccctgggcctgaaggccggcggcttctggcccggcaacgccgccaagggcctgaccaaccaccagagcaccgtgttcctgttcgacgccgacaccggcaggtgcagggccgtggtgggcggcaacctgctgaccgccctgaggaccgccgccgcctgcgccatcagcgtgaggcacctggccaggaaggacgccagggtgctgggcatgatcggcgccggccaccagagcgccttccagctgagggccgccctggcccagaggcccttcgagagggtgctggcctggaacctgcaccccggcatgttcggcaggatggaggccgtggccagggagaggggcgtgcccttcgaggccgtggacctggacaggctgggcgccgaggccgacgtggtggtgaccatcaccagcagcttcgcccccatcctgaaggccgcccaggtgaggcccggcacccacgtggcctgcatgggcaccgacaccaggggcaagcaggaggtggaggccgccctgctggccgccgccaccgtgttcaccgacgaggtggcccagagcgtgagcatcggcgaggcccagcacgccgtggccaggggcctgctggccgccgacagcatcgtggagatcggcgccgtgatcaacggcgaccaccccggcagggtgagcgagagcgagatcaccctgttcgacggcaccggcgtgggcctgcaggacctggccgtggccgccgtggccgtggacagggccgtggccaagggcctggccaccgaggtggacgtg

SEQ ID NO: 240 - DNA, 960 bp, Paracoccus pantotrophus DSM 1403
atgctggtggtggccgagaaggagatcgccggcctgatgacccccgaggccgccttcgaggccatcgaggccatcttcgccagcatggccaggaggaaggcctacaacttccccgtggtgagggaggccatcggccacgaggacgccctgtacggcttcaagggcggcttcgacgccagcgccctggtgctgggcctgaaggccggcggctactggcccaacaaccagaagcacaacctgatcaaccaccagagcaccgtgttcctgttcgaccccgacaccggcagggccaccgccgccgtgggcggcaacctgctgaccgccctgaggaccgccgccgccagcgccgtgagcatcaagtacctggcccccaagggcgccaaggtgctgggcatgatcggcgccggccaccagagcgccttccagatgagggccgtggccaacgtgcaccccttcgagaaggtgatcggctggaacccccaccccgagatgctgagcaggctggccgacaccgccgccgagctgggcctgcccttcgaggccgtggagctggacaggctgggcaccgaggccgacgtgatcatcagcatcaccagcagcttcagccccctgctgatggaccagcacgtgaagggccccacccacatcgccgccatgggcaccgacaccaagggcaagcaggagctggaccccgccctggtggccagggccaggatcttcaccgacgaggtggcccagagcgtgagcatcggcgagtgccagcacgccatcgccagcggcctgatcagggaggaccagatcggcgagctgggcgccgtggtggccggcgaccaccccggcaggggcgacgccgaggtgaccctgttcgacggcaccggcgtgggcctgcaggacctggccgtggcccagaaggtgctggagatcgccaaggagaagggcctggcccaggaggtggagatc

SEQ ID NO: 241 - DNA, 963 bp, Rhizobium lusitanum P1-7; identical to SEQ ID NO: 95

SEQ ID NO: 242 - DNA, 999 bp, Paracoccus alkenifer DSM 11593
atgatcatcgtgcccgagcacgccatcgccggcctggtgagcgccagcgactgcctggaggccgtggagcaggtgttcgccgccatggccaggaggagcgccaggaacttccccgtgatcagggaggccctgggccacgccgacgccctgtacggcttcaagagcggcttcgacagggagagcctggccctgggcctgaagagcggcggcttctggcccggcaacatcagcaggggcctgaccaaccaccagagcaccgtgttcctgttcgacgccgacaccggcgcctgcagggccgtggtgggcggcaacctgctgaccgccctgaggaccgccgccgccagcgccatcagcatcaagcacctggccaggcccgacgccagggtgctgggcatgatcggcgccggccaccagagcagcttccagctgagggccgccctggcccagaggcacttcgagaaggtggtgggctggaacctgcaccagcccgacctggccaggctgaacgccgtggccaccgagctgggcgtgcccttcgaggccgtggacctggacaggctgggcgccgaggccgacgtgatcatcaccatcaccagcagcttcgaccccatcctgatggccgcccaggtgaggcccggcacccacctggcctgcatgggcaccgacaccgccggcaagcaggaggtggagcccgccctggtggccgccgccaccgtgttcaccgacgagatcacccagagcatcaccctgggcgaggcccagcacgccgccgcccagggcctgctggccgccgcccagatcaccgagctgggcgccgtgatcaacggcacccaccccggcaggaccagcgcccaggagatcaccctgttcgacggcaccggcgtgggcctgcaggacctggccgtggccagcgtggccgtggacagggccctggacaagggcgtggccatcaccgtggacttccagagccccatcggccccgccggcgccaccagcccc

SEQ ID NO: 243 - DNA, 963 bp, Loktanella koreensis DSM 17925
atgatcatcgtgcccgagaaggagatcgccggcctgatgaccagggaggccgccttcgacgccgtggaggccgtgttcgccgccatgagcaagggcagcgcctacaacttccccgtgatcagggaggccatcggccacgccgacgccctgtacggcttcaagagcggcttcgacagggagagcctggccctgggcctgaagagcggcggcttctggcccggcaacgacgccaagggcctgaccaaccaccagagcaccatcttcctgttcgacgccgacaccggccagtgcagggccctggtgggcggcaacctgctgaccgccctgaggaccgccgccgccagcagcgtgagcatcaagcacctggccagggccgacgccaaggtgctgggcatgatcggcgccggccaccagagcaccttccagatgagggccgccctggagcagagggacttcgagaaggtgatcggctggaactaccaccccgacatgctgagcaggctgagcgacctggccgacgagctgggcatccccttcgaggccgtggacctggagaggatgggccaggaggccgacgtgatcatcagcatcaccagcgccttcgcccccagcctgatggacgcccacatcagccacggcacccacatcgcctgcatgggcaccgacaccaagggcaagcaggaggtggagaccgccctgctgggcagggccaaggtgttcaccgacgagatcgcccagagcgtgagcatcggcgaggcccagcacgccatcgccgccggcctgctgaccgccgaccagatcaccgagatcggcagcgtgatcaacggcgacagccccggcaggaccagcgccgacgacatcaccctgttcgacggcaccggcgtgggcctgcaggacctggccgtggccagcaccgtggtggacctggccgtggcccagggcgtggccatcgagatcgagttc

SEQ ID NO: 244 - DNA, 963 bp, Methylobacterium sp. 190MF
atgatcatcgtgagcgagagggagatcgccaccctggtgagccccgccgactgcttcgccgccgtggagggcgtgttcgccagcatggccaagggcaaggcctacaacttccccgtggtgagggaggccatcggccacgccgacgccctgtacggcttcaagagcggcttcgacagggagagcctggccctgggcctgaagagcggcggcttctggcccggcaacgtggagaagggcctgaccaaccaccagagcaccatcttcctgttcgacgccgacaccggctgctgcagggccatcgtgggcggcaacctgctgaccgccctgaggaccgccgccagcagcgccctgagcatcaagtacctggccaggcccgaggccagggtgatcggcatgatcggcgccggccaccagagcaccttccagctgagcgccgccctggaccagaggaggttcgagaaggtggtgggctggaacatcgagcccagcgccctgggcaggctggagagcgtggccgtggagaggggcatccccttcgaggccgtggacctggacaggctgggcgccgaggccgacgtgatcatcaccatcaccagcagcttcgcccccatcctgaaggccgcccaggtgaggcccggcacccacctggcctgcatgggcaccgacaccaagggcaagcaggaggtggaggccgagctgctggccaaggccagcgtgttcaccgacgagatcgcccaggccaccagcatcggcgaggcccagcacgccgtggcccagggcctgctggccgccaccgacatcgtggccatcggcagcgtgatcaacggcgcccaccccggcaggaggagccccgaggacatcaccctgttcgacggcaccggcgtgggcctgcaggacctggccgtggccagcaccgccgtggacctggccatcgccaggggcgtggccagggagatcgacttc

SEQ ID NO: 245 - DNA, 963 bp, Methylobacterium sp. 190MF; identical to SEQ ID NO: 208

SEQ ID NO: 246 - DNA, 996 bp, Ruegeria sp. ANG-S4
atgagggacgagatgaacacccagaccgacggcctgctgatcgtggacgaggacgcctgcgagcagctggtgggcaggcagcaggccttcgacgccgtgcaggacgtgttcgccgccatggccaggggcgacgccaggaacttccccgtggtgagggaggccctgggccacgccgacgccatctacggcttcaagagcggcttcgacaggagcggccaggtgctgggcgtgaagagcggcggctactggcccggcaacagccagaagggcctgaccaaccaccagagcaccgtggtgctgttcgaccccgacaccggcaggatcaccgccctggtgggcggcaactacatgaccgccgtgaggaccgccgccagcagcgccatcagcatcgcccacctggccaggcccgacgcccagatcctgggcatggtgggcgccggccaccagagcaccttccagctgagggccgccgccgagcagagggagttcgagaaggtggtggcctggaacccccaccccgagatgctgcccaggctggccgaggtggccgaggacctgggcctggagttcgaggccaccacccccgagggcctgggcgcccaggccgacgtgatcatcaccatcaccagcgccttcgagcccctgctgaagaaggactgggtgaagcccggcacccacctggcctgcatgggcaccgacaccaagggcaagatggaggtggaccccgccctggtggccgccgccaccctgttcaccgacgaggtggcccagagcatcagcatcggcgaggcccagcacgccgccctgaagggcgagatcagccaggacgccatcacccccatcggcgccgtgatcaacggcgaccacatcggcaggagcaacgacgccgagatcaccctgttcgacggcaccggcgtgggcctgcaggacctggccgtggccagcgtggccgcccagctggccaagaacaccggcctggccaacaaggtgaccctg

SEQ ID NO: 247 - DNA, 963 bp, Leisingera nanhaiensis CGMCC 1.10959; identical to SEQ ID NO: 233

SEQ ID NO: 248 - DNA, 993 bp, Loktanella rosea DSM 29591
atgagcggcaggaagaggaagaccaagaccatgatcatcgtgcccgagaaggagatcgccggcctgctgaccagggccgacgccttcgaggccgtggagaaggtgttcgccagcatgagcaagggcagcgcctacaacttccccgtgatcagggaggccatcggctacgaggacgccctgtacggcttcaagggcggcttcgacaaggccggcatggccctgggcctgaaggccggcggctactggcccaacaacctggagaagcacggcgagatcaaccaccagagcaccgtgttcctgttcgaccccgacaccggcaaggtgaaggccatggtgggcggcaacctgctgaccgccctgaggaccgccgccgccagcagcgtgagcatcaagcacctggccaggaaggacgccaaggtgatgggcatggtgggcgccggccaccaggccaccttccagctgagggccgccctggagcagagggacttcgagaaggtgatcggctggaactaccaccccgagatgctgcccaacatcgagagggtggccaacgaggccggcctgcccttcgaggccgtgcccctggagggcctggccgaggccgacgtggtgatcagcatcaccagcaccttcgcccccaccatcatggccgaccacatcgcccccggcacccacatcgcctgcatgggcaccgacaccaagggcaagcaggaggtggaggccagcctgctggccagggccaccgtgttcaccgacgaggtggcccagagcatcagcatcggcgaggcccagcacgccatcgccagcggcctgatcgagcagagcgacgtgcacgagctgggcgccgtgatcaacggcacccaccccggcaggaccagcgccgacgagatcaccctgttcgacggcaccggcgtgggcctgcaggacctggccgtggccagcagcatcgtggacctggccgtggagaagggcgtggccaccatcgtggacttc

SEQ ID NO: 249 - DNA, 963 bp, Poseidonocella pacifica DSM 29316
atgatcatcgtgcccgagaacaagatcggcgacctgatgaccagggccgacagcttcgccgccgtggagaaggtgttcgccagcatggccaagggcagcgcctacaacttccccgtgatcagggaggccatcggccacgccgacgccctgtacggcttcaagagcggcttcgacaggagcgagctggtgctgggcctgaagagcggcggcttctggcccggcaacatggagaagggcctgaccaaccaccagagcaccgtgttcctgttcgacgccgacaccggcaagtgcaaggccgtggtgggcggcaacctgctgaccgccctgaggaccgccgccgccagcgccgtgagcatcaagtacctggcccccaagggcgccaaggtgctgggcatgatcggcgccggccaccagagcgccttccagatgagggccgccgccgagcagagggacttcgagaaggtgatcggctggaacgtggaccccgccatgctgagcaggctggaggagaccgccgccgagatcggcctgcccttcgaggccgtggacctggacaggctgggcgccgaggccgacaccatcatcaccatcaccagcagcttcgacgccatcctgatggacgcccaggtgaccggcggcacccacatcgcctgcatgggcaccgacaccaagggcaagcaggaggtggacgccgccctggtgggcagggccaccgtgttcaccgacgaggtggcccagagcatcagcatcggcgaggcccagcacgccgtggccaacggcgtgctgaaggaggccgacatcgcccagatcggcgccgtgatcaacggcgaccaccccggcaggaccagcgacgacgagctgaccctgttcgacggcaccggcgtgggcctgcaggacctggccgtggccgacgccgtggtgaagagggccgtggaggccggcgtggccgtggaggtggacttc

SEQ ID NO: 250 - DNA, 963 bp, Leisingera sp. ANG-S5
atgtacatcgtgcccgagaaggccatcgccgacctggtgaccagggaggccagcttcgacgccgtggagaaggtgttcgccgccatggccgccggcgacgcctacaacttccccgtggtgagggaggccatcggccacgaggacgccctgtacggcttcaagggcggcttcgacagggccggcctgaccctgggcctgaaggccggcggctactggcccaacaacctggagaagaggggcctgatcaaccaccagagcaccgtgttcctgttcgaccccgacaccggcaaggtgaaggccatggtgggcggcaacctgctgaccgccctgaggaccgccgccgccagcagcgtgagcatcaagcacctggccaggcaggacgccaaggtgatcggcatgatcggcgccggccaccaggccaccttccagctgagggccgccctggagcagaggcagttcgagaaggtgatcggctggaactaccaccccgagatgctgcccaacatcgagaaggtggccgccgaggccggcctgcccttcgaggccgtggacctgcccggcatgaccgaggccgacgtgatcatcagcatcaccagcgccttcgcccccagcctgatggccgaccacgtgagccccggcacccacatcgcctgcatgggcaccgacaccaagggcaagcaggaggtggaggccgagctgctggtgaaggccagcgtgttcaccgacgaggtggcccagagcatcagcatcggcgaggcccagcacgccgtggcccagggcctgatccaggagagcgacgtggcccagatcggcgccgtgatcaacggcaccaaccccggcaggaccagcgacgaccagatcaccctgttcgacggcaccggcgtgggcctgcaggacctggccgtggccgccagcgtggtggaggtggccgtggagaagggcatcgccatcgaggtggacttc

SEQ ID NO: 251 - DNA, 963 bp, Cribrihabitans marinus DSM 29340
atgctgatcgtgcccgagagggagatcgccgacctgatgaccagggaggccgccttcgacgccgtggagaaggtgttcgccgccatggccagcggcgacgcctacaacttccccgtggtgagggaggccatcggccacgaggacgccctgtacggcttcaagggcggcttcgacagggccggcctgaccctgggcctgaaggccggcggctactggcccaacaacctggacaagaggggcatcatcaaccaccagagcaccgtgttcctgttcgaccccgacaccggcatggtgaaggccatggtgggcggcaacctgctgaccgccctgaggaccgccgccgccagcagcgtgagcatcaggcacctggccaggaaggacgccagggtgatcggcatgatcggcgccggccaccaggccaggttccagctgagggccgccctggagcagagggacttcgagaaggtgatcggctggaacttccaccccgagatgctgcccaacctgcaggaggtggccgaggccgccggcctgcccttcgaggccgtggagctggacggcatgagggaggccgacgtgatcgtgagcatcaccagcagcttcgacgccatcctgggcgccgaccaggtgagccccggcacccacgtggcctgcatgggcaccgacaccaagggcaagaaggaggtggacccccagctgctggtgagggccgacgtgttcaccgacgaggtggcccagagcgtgagcatcggcgaggcccagcacgccgtgggcaggggcctgatcagcgaggccgacgtggcccagctgggcgccgtgatcaacggcagccacgccggcaggagcagcgacgaccagatcaccctgttcgacggcaccggcgtgggcctgcaggacctggccgtggccgccgccgtggtggacctggccgtggagaggggcatcgccatcgaggtggacttc

SEQ ID NO: 252 - DNA, 963 bp, Ruegeria mobilis DSM 23403
atgtacatcgtgcccgagagggccatcgccgacctgatgaccagggacgccgccttcgacgccgtggagaaggtgttcgccgccatggccgccggcgacgcctacaacttccccgtggtgagggaggccatcggccacgaggacgccctgtacggcttcaagggcggcttcgacagggccggcctgagcctgggcctgaaggccggcggctactggcccaacaacctggagaagaggggcctgatcaaccaccagagcaccgtgttcctgttcgaccccgacaccggcaaggtgagggccatggtgggcggcaacctgctgaccgccctgaggaccgccgccgccagcagcgtgagcatcaagcacctggccagggaggacgccaaggtgatcggcatgatcggcgccggccaccaggccaagttccagctgagggccgccctggagcagagggacttcgacaaggtgatcggctggaacctgcaccccgagatgctgctgaacctggaggaggtggccaccgaggccggcctgcccttcgaggccgtggagctggacggcatgagggccgccgacgtgatcatcagcatcaccagcagcttcgacgccatcctgaaggccgaccaggtgagccccggcacccacatcgcctgcatgggcaccgacaccaagggcaagcaggaggtggacccccagctgctggtgagggccaccgtgttcaccgacgaggtggcccagagcaccagcatcggcgaggcccagcacgccgtggcccagggcctgatcggcgaggccgacgtggcccagctgggcgccgtgatcaacggcgcccaccccggcaggaccagcgccgagcagatcaccctgttcgacggcaccggcgtgggcctgcaggacctggccgtggccgccagcgtggtggagctggccgtgaagaagggcatcgccatcgaggtggacttc

SEQ ID NO: 253 - DNA, 963 bp, Pseudopelagicola gijangensis DSM 100564
atgtggatcgtgcccgagagggagatcgccggcctgatgaccagggaggccgccttcggcgccgtggagaaggtgttcagcagcatggccagcggcgacgcccacaacttccccgtgatcagggaggccatcggccacgaggaggccctgtacggcttcaagggcggcttcgacagggccggcgccgccctgggcctgaaggccggcggctactggccccacaacctggagaagaggggcctgatcaaccaccagagcaccgtgttcctgttcgaccccgacaccggcaaggccagcgccatggtgggcggcaacctgctgaccgccctgaggaccgccgccgccagcagcgtgagcatcaagcacctggccaggagcgacgccaaggtgatcggcatggtgggcgccggccaccaggccaccttccagctgagggccgccctggagcagaggaacttcgacaaggtgatcggctggaacctgcaccccgagatgctgcccaacctggagaaggtggccacccaggccggcctgcccttcgaggccgtggagctggacggcctgcacgaggccgacgtgatcatcaccatcaccagcagcttcgaggccagcctgatgagccaccacgtgagcgacggcacccacatcgcctgcatgggcaccgacaccgtgggcaagcaggaggtggagcccgccctgatcgagagggccagcgtgttcaccgacgaggtggcccaggccatcagcctgggcgagagccagcacgccgtgtgcgccggcaccaaggccgagagcgacatcaacgagatcggcgccgtgatcaacggcacccacaggggcaggaagagcgacgacgaggtgaccctgttcgacggcaccggcgtgggcctgcaggacctggccgtggccgccagcgtggtggacctggccatcgccaagggcgtggccatcgaggtggacttc

SEQ ID NO: 254 - DNA, 981 bp, Ruegeria atlantica CECT 4293
atgaccacccaggacggcctgctgatcgtgggcgaggacctgtgcgagcagctggtgggcaggcagcaggccttcgacgccgtgcagagcgtgttcggcgccatggccaacggcggcgccaggaacttccccgtggtgagggaggccctgggctacgccgacgccctgtacggcttcaagagcggcttcgacagggacggccaggtgctgggcgtgaagagcggcggctactggcccggcaacgccgagcagggcctgaccaaccaccagagcaccgtgttcctgttcgaccccgacaccggcaggctgagcgccctggtgggcggcaactacctgaccgccgtgaggaccgccgccagcagcgccgtgagcatcgcccagctggccaggaaggacgccaaggtgctgggcatggtgggcgccggccaccagagcgccttccagctgagggccgccgccgagcagagggacttcgagaaggtggtggcctggaacccccaccccgacatgctgcccaggctggccgccgtggccgaggagatcggcctggagttcgaggccgtgagccagcaggagctgggcgcccagagcgacgtgatcatcaccatcaccagcgccttcgagcccctgctgatgaaggactggatcaagcccggcacccacctggcctgcatgggcaccgacaccaagggcaagatggaggtggaccccgccctggtggccagcgccaccgtgttcaccgacgaggtggcccagagcgccaccatcggcgaggcccagcacgccatgggcagcggcaccctgaccgagacccagatcacccccatcggcgccgtgatcaacggcgaccaccccggcaggagcagcgccgacgagatcaccctgttcgacggcaccggcgtgggcctgcaggacctggccgtggccagcgtggccgccaggctggccgacgaggccggcctggcccagagggccaccctg

SEQ ID NO: 255 - DNA, 993 bp, Thalassobacter stenotrophicus CECT 5294; identical to SEQ ID NO: 238

SEQ ID NO: 256 - DNA, 963 bp, Loktanella sediminilitoris DSM 29955
atgctgatcgtgcccgagagggagatcgccgacctgatgaccagggacgccgccttcgacgccgtggagaaggtgttcgccgccatggccgccggcgacgcctacaacttccccgtggtgagggaggccatcggccacgaggacgccctgtacggcttcaagggcggcttcgaccaggccggcctgaccctgggcctgaaggccggcggctactggccccacaacctggagaagaggggcatcatcaaccaccagagcaccgtgttcctgttcgaccccgacaccggcaaggccaaggccatggtgggcggcaacctgctgaccgccctgaggaccgccgccgccagcagcgtgagcatcaagcacctggccagggacgacgccagcgtgatcggcatgatcggcgccggccaccaggccaccttccagctgagggccgccctggagcagaggcagttcgagaaggtgatcggctggaactaccaccccgacatgctgcccaacatcgagaaggtggccaccgaggccggcctgcccttcgaggccgtggagctggagggcatggtggacgccgacgtgatcatcagcatcaccagcgccttcgcccccagcctgatggccgaccacgtgagccccggcacccacatcgcctgcatgggcaccgacaccaagggcaagcaggaggtggaggccgccctgctggccagggccgccgtgttcaccgacgaggtggcccagagcatcagcatcggcgaggcccagcacgccatcggcgccggcctgatcgccgagaccgacatcaaccagctgggcgccgtgatcaacggcacccacgccggcaggaccagcgacgaccagatcaccctgttcgacggcaccggcgtgggcctgcaggacctggccgtggccgccgccgtggtggacctggccgtgcagaagggcatcgccatcgaggtggacttc

SEQ ID NO: 257 - DNA, 963 bp, Rhizobium taibaishanense DSM 100021T
atgctgatcgtgcccgagagggagatcgccaacctgatcaccgccgccgactgcttcaccgccgtggagagggtgttcgccagcatggccaacaaggccgcctacaacttccccgtgatcagggaggccatcggccacgccgacgccctgtacggcttcaagagcggcttcgacagggagagcctggccctgggcctgaaggccggcggcttctggcccaacaacgtgagcaagggcctgaccaaccaccagagcaccatcttcctgttcgacgccgacaccggcaagtgcagggccgccgtgggcggcaacctgatcaccgccctgaggaccgccgccgccagcgccgtgagcatcaagtacctggccaggcaggaggccaaggtgctgggcatgatcggcgccggccaccagagcgccttccagctgagggccgccctgcagcagaggcagttcgagaaggtggtggcctggaacttccaccccgagatgctgagcaggctggagcaggtggccaacgacgagggcctgcccttcgaggtgctggacctggagaggctgggcgccgagagcgacgtgatcatcagcatcaccagcagcttcgcccccctgctgaaggccagccaggtgaggcccggcacccacgtggcctgcatgggcaccgacaccaagggcaagcaggaggtggagcccgagctggtggccatggccaccgtgttcaccgacgagatcgcccaggccgtgaccatcggcgagtgccagcacgccgtggagaggggcatcaccaacaaggaggccatcatcgagatcggcgccgtgatcagcggcaagcaccccggcaggagcagcgccgacgagatcaccctgttcgacggcaccggcatcgccctgcaggacctggccgtggccagcgtggccgtggagctggccctggtgaagggcgtggccatcgagatcgacttc

SEQ ID NO: 258 - DNA, 963 bp, Rhodobacteraceae bacterium JGI 01_L11_4000m
atgctgatcgtgcccgagagggagatcgccgacctgatgaccagggccgccgccttcgacgccatcgagaaggtgttcgccgccatggccagcggcgacgcctacaacttccccgtggtgagggaggccatcggccacgaggacgccctgtacggcttcaagggcggcttcgacagggccggcctgaccctgggcctgaaggccggcggctactggcccaacaacctggagaagaggggcctgatcaaccaccagagcaccgtgttcctgttcgaccccgacagcggcaaggtgaaggccatggtgggcggcaacctgctgaccgccctgaggaccgccgccgccagcagcgtgagcatcaagcacctggccaggaaggacgccagcgtgctgggcatggtgggcgccggccaccaggccaccttccagctgagggccgccctggagcagaggaacttcgagaaggtgatcggctggaactaccaccccgagatgctgcccaacatcgagaaggtggcccaggaggccggcgtgcccttcgaggccgtggacctgcccgccatgaccgaggccgacgtgatcatcagcatcaccagcgccttcgcccccagcctgatggccgaccacgtgagccccggcacccacgtggcctgcatgggcaccgacaccaagggcaagcaggaggtggaggccgccctgctgggcagggccgccgtgttcaccgacgaggtggcccagagcgtgagcatcggcgaggcccagcacgccatcgccgagggcatcatcaccgagaccgacgtggcccagctgggcgccgtgatcaacggcgaccaccccggcaggatcagcaaggaccagatcaccctgttcgacggcaccggcgtgggcctgcaggacctggccgtggccgccaaggtggtggacctggccgtggagaagggcatcgccgtggaggtggacttc

SEQ ID NO: 259 - DNA, 963 bp, Sulfitobacter sp. HI0054; identical to SEQ ID NO: 258

SEQ ID NO: 260 - DNA, 963 bp, Labrenzia aggregata CECT 4801
atgatcatcgtgcccgagaaggagatcgccggcctgatcggcaggcaggagagcttcgacgccgtggagagcgtgttcgccgccatggccggcggcgccgcctacaacttccccgtgatcagggaggccatcggccacgccgacgccctgtacggcttcaagagcggcttcgacaggagcagcctggccctgggcctgaagagcggcggctactggcccggcaacatggccaagggcctgaccaaccaccagagcaccgtgttcctgttcgacgccgacaccggcaaggccaaggccgtggtgggcggcaacctgctgaccgccctgaggaccgccgccgccagcgccgtgagcatcaagcacctggccaggaaggacgccaaggtgctgggcatgatcggcgccggccaccagagcgccttccagatgagggccgccgtggagcagagggacttcgagaaggtgctgggctggaacctgcaccccgagatgctggtgaggctggaggagaccgccaacgagctgggcctgccctacgagagcgtggacctggccaggctgggcgccgaggccgacgtgatcatcagcatcaccagcagcttcgaccccatcctgatggaggagcacgtgagccccggcacccacatcgcctgcatgggcaccgacaccaagggcaagcaggaggtggacgtggccctggtggccaaggccaagctgttcaccgacgagatcgcccagagcgccaccatcggcgagtgccagcacgccgtggccagcggcatcgtgagcgaggacaacatcatcgagatcggcgccgtgatcaacggcaaccaccccggcaggaccagccagagcgacatcaccctgttcgacggcaccggcgtgggcctgcaggacctggccgtggccagcgccgccgtggacctggccatccagaagggcgtggccatcgaggtggacttc

SEQ ID NO: 261 - DNA, 963 bp, Roseovarius nubinhibens ISM
atgctgatcgtgcccgagaggcagatccccgacctgctgaccaggagcgccagcttcaccgccgtggagaaggtgttcgccgccatggccgccggccaggcctacaacttccccgtgatcagggaggccatcggccacgaggacgccctgtacggcttcaagggcggcttcgacagggacggccacaccctgggcctgaaggccggcggctactggccccacaacctggagaagaggggcctgatcaaccaccagagcaccgtgttcctgttcgaccccgacagcggcatgatcagcgccatggtgggcggcaactacatgaccgccctgaggaccgccgccgccagcgccgtgagcatccagcacctggccaggcccgacgccaaggtgatcggcatgatcggcgccggccaccaggccaccttccagctgagggccgccctggagcagaggcccttcgagaaggtgatcggctggaacctgcaccccgagatgctgcccaacctggccgccgtggccgaggaggccggcctgcccttcgaggccgtggagctggacggcatgaccgaggccgacgtgatcatcaccatcaccagcagcttcgcccccagcctgctggcccagcacgtgagccccggcacccacatcgcctgcatgggcaccgacaccaagggcaagcaggagctggaggccgccctgctgggcagcgccaccgtgttcgccgacgagatcgaccagagcatcaccctgggcgaggcccagcacgccatcgccaccggcctgatcagcagggacgacatcaccgagatcggcgccgtgatcaacggcacccaccccggcaggagcagcgccgaggagatcaccctgttcgacggcaccggcgtgggcctgcaggacctggccgtggccgccgccgtggtggacctggccgtggagcagggcgtggccatcgaggtggacttc

SEQ ID NO: 262 - DNA, 963 bp, Roseobacter sp. SK209-2-6
atgtacatcgtgcccgagagggagatcgccggcctgatgaccagggaggccagcttcgccgccgtggagaaggtgttcgccgccatggccgccaaggacgcctacaacttccccgtgatcagggaggccatcggccacgaggacgccctgtacggcttcaagggcggcttcgacagggccggccagaccctgggcctgaaggccggcggctactggcccaacaacctggagaagaggggcctgatcaaccaccagagcaccgtgttcctgttcgaccccgacaccggcaaggccagcgccatggtgggcggcaacctgctgaccgccctgaggaccgccgccgccagcagcgtgagcatcagccacctggccaggaaggacgccaaggtgatcggcatgatcggcgccggccaccaggccaagttccagctgagggccgccctggagcagagggagttcgagaaggtgatcggctggaacctgcaccccgagatgctgcccaacctgcaggaggtggccgacgaggccggcctgcccttcgaggccgtggagctggacggcatgagggaggccgacgtgatcatcagcatcaccagcagcttcgacgccatcctgggcgccgaccaggtgagccccggcacccacctggcctgcatgggcaccgacaccaagggcaagcaggaggtggaccccgccctgctggtgaaggccaccgtgttcaccgacgaggtggcccagagcatcagcatcggcgaggcccagcacgccatcgcccagggcctgatcggcgagggcgacatcgcccagctgggcgccgtgatcaacaaggcccaccccggcaggcagagcgacgaggaggtgaccctgttcgacggcaccggcgtgggcctgcaggacctggccgtggccagcgccgtggtggaccaggccgtgaagaccggcatcgccatcgaggtggacttc

SEQ ID NO: 263 - DNA, 963 bp, Rhodobacterales bacterium HTCC2083 scf_1106200183017
atgtggatcgtgcccgagagggagatcgccgacctgctgaccagggacgccagcttcgaggccgtggagaacgtgttcgccgccatggccgccggcgacgcctacaacttccccgtgatcagggaggccatcggccacgaggacgccctgtacggcttcaagggcggcttcgacggcgtgggcggcaccctgggcctgaaggccggcggctactggccccacaacctggagaagaggggcctgatcaaccaccagagcaccgtgttcctgttcgaccccgacaccggcaaggtggccgccatggtgggcggcaactacctgaccgccctgaggaccgccgccgccagcagcgtgagcatcaagcacctggccagggccgacgccaaggtgatgggcatggtgggcgccggccaccaggccaccttccagctgagggccgccctggagcagagggccttcgagaaggtgatcggctggaactaccaccccgagatgctgcccaacatcgagaaggtggccaacgaggccggcgtgcccttcgaggccgtggagctggacggcctgggcgaggccgacgtggtgatcagcatcaccagcaccttcgcccccaccatcatggccgagcacatcagcgccggcacccacatcgcctgcatgggcaccgacaccaagggcaagcaggaggtggaggccgccctgctggccagggccagcgtgttcaccgacgaggtggcccagagcgtgagcatcggcgaggcccagcacgccatcgccgagaggctgatcgccgtgagcgacgtgacccagatcggcgccgtgatcaacggcacccacgagggcaggaccagcgaggaggagatcaccctgttcgacggcaccggcgtgggcctgcaggacctggccgtgagcgccgccatcgtgaggatggccatcgagcagggcgtggccatcgaggtggacttc

SEQ ID NO: 264 - DNA, 963 bp, Agrobacterium sp. ATCC 31749 AGT22
atgatcatcgtgcccgagcacgagatcgagagcctggtgagcgccagcgactgcttcaccgccgtggagagggtgttcgccagcatggcccagaagagcgcctacaacttccccgtgatcagggaggccatcggccacgccgacgccctgtacggcttcaagagcggcttcgacagggagagcctggccctgggcctgaagagcggcggcttctggcccaacaacatcgagaagggcctgaccaaccaccagagcaccatcttcctgttcgacgccgacaccggcaagtgcagggccgtggtgggcggcaacctgctgaccgccctgaggaccgccgccgccagcgccgtgagcatcaagtacctggccaggcccgacgccaaggtgctgggcatggtgggcgccggccaccagagcaccttccagctgagggccgccctggagcagagggccttcgagaaggtggtgggctggaacatctaccccgaggccctggacaggctggccaagatcgccgccgagcacgacgtgcccttcgaggccgtggacctggacaggctgggcgccgaggccgacgtgatcatcaccatcaccagcgccttcgcccccatcctgaaggccgcccagatcaggaggggcacccacctggcctgcatgggcaccgacaccaagggcaagcaggaggtggaggccgagctgctggccgccgccaccatcttcagcgacgagatcgcccagagcgtgaccatcggcgaggcccagcaccccgtggccaggggcctgatcagccccgacaggatcaccgagatcggcgccgtgatcaacggcgcccaccccggcaggaccaacgccgacgagatcaccgtgttcgacggcaccggcgtgggcctgcaggacctggccgtggccagcaaggccgtggacctggccgtgcagaagggcgtggccgtggtggtggacttc

SEQ ID NO: 265 - DNA, 960 bp, Paracoccus sp. TRP Paracoccus_TRP_Contig_10
atgtacgtggtggccgagaaggagatcgccggcctgatgaaccccgaggccgccttcgaggccatcgaggccgtgttcgccgccatggccaggaggaaggcctacaacttccccgtggtgagggaggccatcggctacgaggacgccctgtacggcttcaagggcggcttcgacgccagcggcctggccctgggcctgaaggccggcggctactggcccaacaaccagaagcacggcctgatcaaccaccagagcaccgtgttcctgttcgaccccgacaccggcagggtgagcgccgccgtgggcggcaacctgctgaccgccctgaggaccgccgccgccagcgccgtgagcatcaagtacctggcccccatcggcgccaaggtgctgggcatgatcggcgccggccaccagagcgccttccagatgagggccgccgccaacgtgcacggcttcgagaaggtgatcggctggaacccccaccccgagatgctgagcaggctggccgacaccgccgccgagctgggcctgcccttcgaggccgtggacctgccccagctgggcgaggaggccgacgtgatcatcagcatcaccagcagcttcagccccctgctgctgaacgagcacgtgaagggccccacccacatcgccgccatgggcaccgacaccaagggcaagcaggagctggaccccgccctggtgaccagggccaggatcttcaccgacgaggtggcccagagcatcagcatcggcgagtgccagcacgccatcgccgccggcctgatcaaggaggagcagatcagcgagctgggcgccgtggtgaccggcgacaaccccggcagggccgacgccgaggtgaccctgttcgacggcaccggcgtgggcctgcaggacctggccgtggcccagaaggtgctggagatcgccaaggagaagggcatcgcccagcaggtggagatc

SEQ ID NO: 266 - DNA, 963 bp, pAqui_F126
atgtacatcgtgcccgagaaggccatcgccgacctggtgaccagggaggccagcttcgacgccgtggagaaggtgttcgccgccatggccgccggcgacgcctacaacttccccgtggtgagggaggccatcggccacgaggacgccctgtacggcttcaagggcggcttcgacagggccggcctgaccctgggcctgaaggccggcggctactggcccaacaacctggagaagaggggcctgatcaaccaccagagcaccgtgttcctgttcgaccccgacaccggcaaggtgaaggccatggtgggcggcaacctgctgaccgccctgaggaccgccgccgccagcagcgtgagcatcaagcacctggccaggcaggacgccaaggtgatcggcatgatcggcgccggccaccaggccaagttccagctgagggccgccctggagcagaggagcttcgagaaggtgatcggctggaacctgcaccccgagatgctgcccaacctgcaggaggtggccgacgaggccggcctgcccttcgaggccgtggagctggacggcatgagggaggccgacgtgatcatcagcatcaccagcagcttcgacgccatcctgaaggccgaccaggtgagccccggcacccacgtggcctgcatgggcaccgacaccaagggcaagcaggaggtggacccccagctgctggtggccgccgacgtgttcaccgacgaggtggcccagagcgtgagcatcggcgaggcccagcacgccatcgcccagggcctgatccagaagggcgacgtggcccagatcggcgccgtgatcaacggcatcaaccccggcaggaccagcgacgaccagatcaccctgttcgacggcaccggcgtgggcctgcaggacctggccgtggccgccagcgtggtggacgtggccgtggagaagggcatcgccatcgaggtggacttc

SEQ ID NO: 267 - DNA, 822 bp, Ruegeria mobilis F1926
gacgccctgtacggcttcaagggcggcttcgacagcgccggcctgagcctgggcctgaaggccggcggctactggcccaacaacctggagaagaggggcctgatcaaccaccagagcaccgtgttcctgttcgaccccgacaccggcaaggtgagggccatggtgggcggcaacctgctgaccgccctgaggaccgccgccgccagcagcgtgagcatcaagcacctggccagggaggacgccaaggtgatcggcatgatcggcgccggccaccaggccaagttccagctgagggccgccctggagcagagggacttcgacaaggtgatcggctggaacctgcaccccgagatgctgcccaacctgaaggaggtggccaccgaggccggcctgcccttcgaggccgtggagctggacggcctgaaggaggccgacgtgatcatcagcatcaccagcagcttcgacgccatcctgaaggccgaccaggtgagccccggcacccacatcgcctgcatgggcaccgacaccaagggcaagcaggaggtggacccccagctgctggtgagggccaccgtgttcaccgacgaggtggcccagagcatcagcatcggcgaggcccagcacgccgtggcccagggcctgatcaccgaggccgacgtggcccagctgggcgccgtgatcaacggcgcccaccccggcaggagcagcgccgagcagatcaccctgttcgacggcaccggcgtgggcctgcaggacctggccgtggccgccagcgtggtggagctggccgtgaagaagggcgtggccatcgaggtggacttc

SEQ ID NO: 268 - DNA, 963 bp, Oceanicola sp. HL-35
atgctgatcgtgcccgagagggagatcgccgacctgatgaccagggaggccgccttcgaggccgtggagaaggtgttcgccgccatggccgccggcgacgcctacaacttccccgtggtgagggaggccatcggccacgaggacgccctgtacggcttcaagggcggcttcgacagggccggcctgaccctgggcctgaaggccggcggctactggcccaacaacctggacaagaggagcatcatcaaccaccagagcaccgtgttcctgttcgaccccgacaccggcaaggccagggccatggtgggcggcaacctgctgaccgccctgaggaccgccgccgccagcagcgtgagcatcaggcacctggccaggaaggacgccaaggtgatcggcatgatcggcgccggccaccaggccaagttccagctgagggccgccctggagcagaggggcttcgagaaggtgatcggctggaacctgcaccccgagatgctgcccaacctggaggaggtggccagcgaggccggcctgcccttcgaggccgtggagctggacggcatgaccgaggccgacgtgatcatcaccatcaccagcagcttcggcgccatcctgagcgccggccaggtgagccccggcacccacgtggcctgcatgggcaccgacaccaccggcaagcaggaggtggagcccgccctgctgggccacgccaccgtgttcaccgacgaggtggcccagagcgtgagcatcggcgaggcccagcacgccgtgagccagggcctgatcgccgagagcgacatcgcccagctgggcgccgtgatcaacggcagccaccccggcaggatcagcgaccaccagatcaccctgttcgacggcaccggcgtgggcctgcaggacctggccgtggccgccgccgtggtggacctggccgtggagaagggcatcgccatcgaggtggacttc

SEQ ID NO: 269 - DNA, 999 bp, Psychrobacter sp. G
atgagcgaggccaacagcgtgaacagcgacgagggcctgctgatcgtgagcgaggacgcctgcaagagcgtgatcgacaggcccagcgccttcatcgccgtggagaacgtgttcgccagcatgagcaggggcgacgcctacaacttccccgtgatcagggaggccatcggctacgccgacgccctgtacggcttcaagagcggcttcgacagggccggcaagagcctgggcctgaagagcggcggctactggcccggcaacgccgccaagggcctgaccaaccaccagagcaccatcttcctgttcaaccccgacaacggcaagctgagggccctggtgggcggcaactacctgaccgccgtgaggaccgccgccgccagcgccgtgagcatcgcccacctggccaggaaggacagcaaggtgctgggcatggtgggcgccggccaccagagcaccttccagctgagggccgccctggagcagaggaacttcgagaaggtggtggcctggaacaagaacaaggacaggctgaagaacctgcaggccgtggccgaggagctgggcgtgcccttcgaggccgtggagagggagcagctgtgcagcgaggccgacgtgatcatcaccatcaccagcgccttcgagcccctgctgatgaaggagtggatcaagcccggcacccacatcgcctgcatgggcaccgacaccgtgggcaagcaggaggtggacgtgaacctggtggccgccgccaccgtgttcaccgacgagatcgcccagagcatcagcctgggcgaggcccagcacgccatcaagagcggcgccatcaaggagagcgacatcaccaccctgggcgacgtgatcaacggcgaccaccccggcaggagcagcgacgacgagatcaccctgttcgacggcaccggcgtgggcctgcaggacctggccgtggccagcgccgccgccaagctggccctggagaagggcgaggcccagcacatcagcctg

SEQ ID NO: 270 - DNA, 963 bp, Ensifer meliloti Rm41
atgatcatcgtgcccgagaaccagatcgccggcctgatcacccccgccgactgcctggtggccgtggagggcgtgttcgccagcatggccaagaggagcgcctacaacttccccgtgatcagggaggccatcggccacgccgacgccctgtacggcttcaagagcggcttcgacagggacagcctggccctgggcctgaagagcggcggcttctggcccaacaacgtgcagaagggcctggccaaccaccagagcaccgtgttcctgttcgacgccgacaccggcaggtgcagggccatggtgggcggcaacctgctgaccgccctgaggaccgccgccgccagcgccgtgagcatcaagtacctggccaggaaggacgccaaggtgctgggcatgatcggcgccggccaccagagcacctaccagctgagggccgccgtggagcagaggcccttcgagaaggtgctggcctggaacctgcaccccgagatgctgagcaggctggagggcgtggccagggagctggagctgcccttcgagaccgtggacctggacaggctgggcgacgagagcgacgtgatcatcagcatcaccagcagcttcgcccccatcctgaaggccagccaggtgaggcccggcacccacctggcctgcatgggcaccgacaccaagggcaagcaggagatggacgccgagctgatcgccgccgccaccgtgttcgccgacgaggtggcccaggccatcaccatcggcgagtgccagcacgccatcgagaagggcctgatcagcagggacgacatcgtggagatcggcgccgtgatcaccggcaggcaccccggcaggagcagccccgaggagatcaccctgttcgacggcaccggcgtgggcctgcaggacctggccgtggccagcgccgccgtggagctggccctgagcaacggcaccgccatcgaggtggacttc

SEQ ID NO: 271 - DNA, 1002 bp, Roseovarius sp. MCTG156(2b)
atgatgaacacccacgtggagaccaccgccgacggcttcgtgatcgtgggcgaggagatctgccagaagatcatcagcagggccgacgccttcggcgccgtggaggccgtgttcgccgccatggccaggggcgacgcctacaacttccccgtggtgagggaggccatcggccacgccgacgccctgtacggcttcaagggcggcttcgacaggagcggcctgagcctgggcctgaaggccggcggctactggcccggcaacatggacaagggcctgaccaaccaccagagcaccgtgttcctgttcgaccccgacaccggcaggctgagcgccctggtgggcggcaactacctgaccgccctgaggaccgccgccagcagcagcgtgagcatcgcccacctggccagggaggacagcaaggtgctgggcatggtgggcgccggccaccagagcgccttccagctgagggccgccgtggagcagaggagcttcgagaaggtggtggcctggaacccccaccccgacatgctgcccaggctgggcgccgtggccgaggagctgggcctggagttcgaggccgtgacccaggaggagctgggcgcccaggccgacgtgatcatcaccatcaccagcgccttcgagcccctgatgatggccgactgggtgaagcccggcacccacatcgcctgcatgggcaccgacaccaagggcaagcaggaggtggaccccgccctgttcaccagggccaccgtgttcgccgacgagatcgcccagagcgtgagcatcggcgaggcccagcacgccgtggcccagggcctgatcagcgagggcgacatcacccccatcggcgccgtgatcaacggcacccacgccggcagggccagcgccgaggaggtgaccctgttcgacggcaccggcgtgggcctgcaggacctggccgtggccagcgtggccgccaagctggccagggaccagggcctggtgacccccatcaccctgggc

SEQ ID NO: 272 - DNA, 963 bp, Rhizobium rhizogenes OK036
atgatcatcgtgcccgagaccgagatcgccggcctggtgaccgccgccgactgcttcaaggccgtggagggcgtgttcgccagcatggccaacaagagcgcctacaacttccccgtggtgagggaggccatcggccacgccgacgccctgtacggcttcaagagcggcttcgacaggaagggcctggccctgggcctgaaggccggcggcttctggcccaacaacgtgcacaggggcctgaccaaccaccagagcaccgtgttcctgttcgaccccgacaccggcaagtgcagggccgtggtgggcggcaacctgctgaccgccctgaggaccgccgccgccagcgccatcagcatcaagtacctggccaggaaggacgccaaggtgctgggcatgatcggcgccggccaccaggccaccttccagctgagggccgccctggcccagaggcagttcgagaagatcgtgggctggaacctgcaccccgacatgctgagcaggctggaggaggtggccaaggaggagggcctgcccttcgaggccgtggacctggacaggctgggcgccgaggccgacgtgatcatcagcatcaccagcagcttcgcccccatgctgaaggccagccaggtgagggccggcacccacctggcctgcatgggcaccgacaccaagggcaagcaggagatcgaggccgagatcctggtgaaggccaccgtgttcaccgacgaggtggcccaggccgtgaccatcggcgagagccagcacgccatcgagaggggcctgatcagggaggaggccatcgtggagatcggcgccgtgatcaacggcacccaccccggcaggatcagcgccgaccagatcaccctgttcgacggcaccggcgtgggcctgcaggacctggccgtggccagcgccgccgtggagctggccctggccaagggcgtggccatcgaggtggacttc

SEQ ID NO: 273 - DNA, 963 bp, Rhizobium leguminosarum YR374; identical to SEQ ID NO: 166

SEQ ID NO: 274 - DNA, 963 bp, Methylobacterium sp. YR668; identical to SEQ ID NO: 180

SEQ ID NO: 275 - DNA, 963 bp, Sinorhizobium americanum CCGM7
atgatcatcgtgcccgagaaccagatcgccggcctgatcacccccgccgactgcctggtggccgtggagagggtgttcgccagcatggccgagaagagcgcctacaacttccccgtgatcagggaggccatcggccacgccgacgccctgtacggcttcaagagcggcttcgacagggacagcctggccctgggcctgaagagcggcggcttctggccccacaacgtggagaagggcctggccaaccaccagagcaccgtgttcctgttcgacgccgacaccggcaggtgcagggccatggtgggcggcaacctgctgaccgccctgaggaccgccgccgccagcgccgtgagcatcaagtacctggccaggaaggacgccaaggtgctgggcatgatcggcgccggccaccagagcacctaccagctgagggccgccgtggagcagaggcccatcgagaaggtgctggcctggaacctgcaccccgagatgctgagcaggctggaggaggtggccagggagctggagctgcccttcgagaccgtggacctggacaggctgggcgccgaggccgacgtgatcatcagcatcaccagcagcttcgcccccatcctgaaggccagccagatcaggcccggcacccacctggcctgcatgggcaccgacaccaagggcaagcaggaggtggaccccgagctggtggccgccgccaccgtgttcaccgacgaggtggcccaggccgtgaccatcggcgagtgccagcacgccatcgacaagggcctgatcagcaaggacgacatcgtggagatcggcgccgtgatcaccggcaggcacaagggcaggagcagcagcgaggagatcaccctgttcgacggcaccggcgtgggcctgcaggacctggccgtggccagcgccgccgtggagctggccctgagcaagggcgccgccatcgaggtggacttc

SEQ ID NO: 276 - DNA, 963 bp, Palleronia marisminoris DSM 26347
atgctgatcgtgcccgagagggagatcgccaacctgatgaccagggaggccgccttcgacgccgtggagaaggtgttcgccgccatggccagcgacgacgccaggaacttccccgtggtgagggaggccatcggccacgaggacgccctgtacggcttcaagggcggcttcgacagggccggcctgaccctgggcctgaaggccggcggctactggccccacaacctggagaagcacgagctgatcaaccaccagagcaccgtgttcctgttcgaccccgacaccggcagggccaaggccatggtgggcggcaacctgctgaccgccctgaggaccgccgccgccagcagcgtgagcatcaagcacctggccagggaggacgccaaggtgatcggcatgatcggcgccggccaccaggccaccttccagctgagggccgccctggagcagaggaggttcgagaaggtgatcggctggaactaccaccccgagatgctgcccaacatcgagaaggtggccaccgaggccggcctgcccttcgaggccgtggacctgcccggcatggccgaggccgacgtgatcatcaccatcaccagcgccttcgcccccagcctgatggccgaccacgtgagccccggcacccacatcgcctgcatgggcaccgacaccaagggcaagcaggaggtggagaccgccctgctgggcagggccaccgtgttcaccgacgaggtggcccagagcatcagcatcggcgaggcccagcacgccatccaggacctgagcctgaggcccgaggacatcatccagctgggcagggtgatcaacggcagccacgagggcaggaccagcgacgacgagatcaccctgttcgacggcaccggcgtgggcctgcaggacctggccgtggccgccgccgtggtggacctggccgtggagaagggcatcagcatcgaggtggacttc

SEQ ID NO: 277 - DNA, 960 bp, Paracoccus aminovorans DSM 8537
atgttcgtggtggccgagaaggagatcgccggcctgatgacccccgaggccgccttcgaggccatcgaggccatcttcgccagcatggccaggaggaaggcctacaacttccccgtggtgagggaggccatcggccacgaggacgccctgtacggcttcaagggcggcttcgacgccagcgccctgaccctgggcctgaaggccggcggctactggcccaacaaccagaagcacaacctgatcaaccaccagagcaccgtgttcctgttcgaccccgacaccggcagggtgagcgccgccatcggcggcaacctgctgaccgccctgaggaccgccgccgccagcgccgtgagcatcaagtacctggccccccagggcgccaaggtgctgggcatgatcggcgccggccaccagagcgccttccagatgagggccgccgccgccgtgcaccagttcgagaaggtgatcggctggaacccccaccccgagatgctgggcaggctggccgagaccgccgccgacctgggcctgcccttcgaggccgtggagctggacaggctgggcgccgaggccgacgtgatcatcagcatcaccagcagcttcagccccctgctgatgaacgagcacgtgaagggccccacccacatcgccgccatgggcaccgacaccaagggcaagcaggagctggaccccgccctggtggccagggccagggtgttcaccgacgaggtggcccagagcgtgagcatcggcgagtgccagcacgccatcgccgccggcctgatcgccgaggaccagatcggcgagctgggcgccgtggtggccggcgacgaccccggcaggggcgacgccgaggtgaccatcttcgacggcaccggcgtgggcctgcaggacctggccgtggccgccaaggtgctggagatcgccaaggagaagggcgtggcccagaccgtggagatc

SEQ ID NO: 278 - DNA, 963 bp, Yangia pacifica CGMCC 1.3455; identical to SEQ ID NO: 216

SEQ ID NO: 279 - DNA, 963 bp, Roseovarius indicus DSM 26383
atgatcatcgtgcccgagagggagatcgccgacctgatgaccagggaggccgccttcgaggccgtggagagggtgttcgccgccatggccgccggcgaggcctacaacttccccgtggtgagggaggccatcggccacgaggacgccctgtacggcttcaagggcggcttcgacaggagcggcctgaccctgggcctgaaggccggcggctactggccccacaacctggccaagaggggcgtgatcaaccaccagagcaccgtggtgctgttcgacgccgacaccggcagggtgcacgccatggtgggcggcaacctgctgaccgccctgaggaccgccgccgccagcgccgtgagcatcaggtacctggccagggaggacgccagggtgctgggcatgatcggcgccggccaccaggccgccttccagctgagggccgccctggagcagaggaggttcgagaaggtgatcggctggaacctgaaccccgagatgctgcccaacctggagaaggtggccgaggaggccggcgtgcccttcgaggccgtggagctgggcggcatgagggaggccgacgtgatcatcagcatcaccagcagcttcgaggccatcctgggcgccgaccaggtgagccccggcacccacgtggcctgcatgggcaccgacaccaagggcaagcaggaggtggcccccggcctgctggccagggccgtggtgttcaccgacgaggtggcccagagcgtgagcatcggcgaggcccagcacgccgtggccatgggcctgatcggcgagggcgacgtgcagcagctgggcgccgtgatcaacggcgcccaccccggcaggaggagcgccgaggagatcaccctgttcgacggcaccggcgtgggcctgcaggacctggccgtggccagcagggtggtggagctggcccaggaggccggcagggccgtgatggtggacttc

SEQ ID NO: 280 - DNA, 963 bp, Jannaschia rubra DSM 16279; identical to SEQ ID NO: 69

SEQ ID NO: 281 - DNA, 963 bp, Rhizobium etli bv. phaseoli IE4803
atgatcatcgtgcccgagagggccatcgccgacctgatcggcagcgccgagtgcttcaccgccgtggagcaggtgttcgccgccatggccaggaagagcgcctacaacttccccgtggtgagggagagcatcggctacgccgacgccctgtacggcttcaagagcggcttcgacagggagagcctgagcctgggcctgaagagcggcggcttctggcccaagaacgtggagaagggcctgaccaaccaccagagcaccgtgttcctgttcgacgccgacaccggcaggtgcagggccgtggtgggcggcaacctgctgaccgccctgaggaccgccgccgccagcgccatcagcatcaagtacctggccagggaggacgccaagaccctgggcatcatcggcgccggccaccagagcaccttccagctgagggccgccgtggagcagaggaacttcgagaaggtggtggcctggaactaccaccccgagatgctgaacaggctggccgaggtggccagggagatcggcctgcccttcgaggccgtggacctggacaggctgggcgccgaggccgacgtgatcatcagcatcaccagcagcttcagccccagcctgatggccgcccaggtgaggcccggcacccacctggcctgcatgggcaccgacaccaagggcaagcaggaggtggacgccaagctggtggccgccagcagcatcttcaccgacgaggtggcccaggccatcaccatcggcgagtgccagcacgccatcgccgacggcctgatcggcgaggccgacatcctggagatcggcgccgtgatcaccggcgacgtgaagggcaggaggagcgccgacgacatcaccctgttcgacggcaccggcgtgggcctgcaggacctggccgtggccgccgccgtggtggacctggccgtgagggagggcgtggccatcgaggtggacttc

SEQ ID NO: 282 - DNA, 963 bp, Roseivivax sediminis DSM 26472
atgctgatcgtgcccgagagggagatcgccgacctgatgaccagggaggccgccttcgccgccgtggagaaggtgttcgccgccatggccagcggcgacgcctacaacttccccgtggtgagggaggccatcggccacgaggacgccctgtacggcttcaagggcggcttcgacagggccggcctgaccctgggcctgaaggccggcggctactggcccaacaacctggacaagaggggcatcatcaaccaccagagcaccgtgttcctgttcgaccccgacaccggcaaggccaaggccatggtgggcggcaacctgctgaccgccctgaggaccgccgccgccagcagcgtgagcatcaggcacctggccaggaaggacgccaaggtgatcggcatgatcggcgccggccaccaggccaagttccagctgagggccgccctggagcagagggacttcgacaaggtgatcggctggaacctgcaccccgacatgctgcccaacctggaggaggtggccgccgaggccggcctgcccttcgaggccgtggagctggacggcatgcaggaggccgacgtgatgatcagcatcaccagcagcttcgacgccatcctgagcgccggccaggtggcccccggcacccacatcgcctgcatgggcaccgacaccaagggcaagcaggaggtggacccccagctgctggccaaggccaccgtgttcaccgacgaggtggcccagagcgtgagcatcggcgaggcccagcacgccgtggcccagggcctgatcgccgagggcgacatcgcccagctgggcgccgtgatcaacggcagccacaagggcagggccagcgacgaggagatcaccctgttcgacggcaccggcgtgggcctgcaggacctggccgtggccaacgccgtggtggagctggccgtggagaagggcatcgccatcgaggtggacttc

SEQ ID NO: 283 - DNA, 963 bp, Agrobacterium sp. KFB 330
atgatcatcgtgcccgagcacgagatcgagggcctggtgagcgccagcgactgcttcaccgccgtggagagggtgttcgccagcatggcccagaagagcgcctacaacttcagcgtgatcagggaggccatcggccacgccgacgccctgtacggcttcaagagcggcttcgacagggagagcctggccctgggcctgaagagcggcggcttctggcccaacaacatggagaagggcctgaccaaccaccagagcaccatcttcctgttcgacgccgacaccggcaagtgcagggccgtggtgggcggcaacctgctgaccgccctgaggaccgccgccgccagcgccgtgagcatcaagtacctggccaggcccgacgccaaggtgctgggcatggtgggcgccggccaccagagcagcttccagctgagggccgccctgcagcagaggcccttcgagaaggtgatcggctggaacctgttccccgaggccctggacaggctggccaaggtggccgccgagcacgacgtgcccttcgaggccgtggacctggacaggctgggcgccgaggccgacgtgatcatcaccatcaccagcagcttcgcccccatcctgaaggccgcccagatcaggcccggcacccacctggcctgcatgggcaccgacaccaagggcaagcaggaggtggaggccgagctgctggccgccgccaccatcttcagcgacgagatcgcccagagcgtgaccatcggcgaggcccagcaccccgtggccaagggcctgatcagccccaacaggatcatcgagatcggcgccgtgatcaacggcgcccaccccggcaggagcaacgccgacgagatcaccgtgttcgacggcaccggcgtgggcctgcaggacctggccgtggccagcaaggccgtggacctggccgtgcagaagggcgtggccgtggtggtggacttc

SEQ ID NO: 284 - DNA, 963 bp, Leisingera sp. ANG-DT; identical to SEQ ID NO: 250

SEQ ID NO: 285 - DNA, 963 bp, Methylobacterium sp. ME121
atgatcatcgtgcccgagcacgccatcgacggcctgctgaccgaggccgagtgcttcggcgccgtggagcaggtgttcgccagcatggccaggaggagggccggcaacttccccgtggtgagggaggccatcggccacgccgacgccatctacggcttcaagagcggcttcgacagggacagcctggccctgggcctgaaggccggcggcttctggcccggcaacgccgccaagggcctgaccaaccaccagagcaccgtgttcctgttcgacgccgacaccggcaggtgcagggccgtggtgggcggcaacctgctgaccgccctgaggaccgccgccgcctgcgccatcagcatcaggcacctggccagggagggcgccagggtgctgggcatgatcggcgccggccaccagagcgccttccagctgagggccgccctggcccagaggcccttcgagagggtgctggcctggaacctgcaccccggcatgttcggcaggatggaggccgtggccagggagaggggcgtgcccttcgaggtggtggacctggacaggctgggcgccgaggccgacgtggtggtgaccatcaccagcagcttcgcccccatcctgaaggccgcccaggtgaggcccggcacccacgtggcctgcatgggcaccgacaccaggggcaagcaggaggtggaggccgagctgctggccgccgccaccgtgttcaccgacgaggtggcccagagcgtgagcctgggcgaggcccagcacgccgtggccaggggcctgctggccgccgacagcatcgtggagatcggcgccgtgatcaacggcgaccaccccggcagggtgagcgacgccgagatcaccgtgttcgacggcaccggcgtgggcctgcaggacctggccgtggccgccgtggccgtggacagggccctggccaagggcctggccaccgaggtgggcttc

SEQ ID NO: 286 - DNA, 963 bp, Litoreibacter meonggei DSM 29466
atgctgatcgtgcccgagagggagatcgccgacctgatgaccagggaggccgccttcgacgccgtggagggcgtgttcgccgccatggccagcaaggacgcctacaacttccccgtgatcagggaggccatcggccacgaggacgccctgtacggcttcaagggcggcttcgacaaggccggcatgaccctgggcctgaaggccggcggctactggcccaacaacctggagaagcacggccacatcaaccaccagagcaccatcttcctgttcgaccccgacaccggcatggtgagcgccatggtgggcggcaacctgctgaccgccctgaggaccgccgccgccagcagcgtgagcatcaagcacctggccaggaaggacgccaaggtgatgggcatggtgggcgccggccaccaggccaccttccagctgagggccgccctggagcagaggcagttcgagaaggtgatcggctggaactaccaccccgagatgctgcccaacatcgagaagatcgccaacgaggccggcctgcccttcgaggccgtggagctggagggcatgagggaggccgacgtggtgatcagcatcaccagcaccttcgcccccaccatcatggccgaccacatcgcccccggcacccacatcgcctgcatgggcaccgacaccaagggcaagcaggaggtggaggccgccctgctggccagggccaccgtgttcaccgacgaggtggcccagagcgtgagcatcggcgaggcccagcacgccgtggcccagggcctgatcaaggagagcgacgtgcaccagctgggcgccgtgatcaacggcaccgacaagggcagggccagcgacgacgagatcaccctgttcgacggcaccggcgtgggcctgcaggacctggccgtggccgccagcgtggtggagctggccgtgcagaagggcgtggccatcgacgtggacttc

SEQ ID NO: 287 - DNA, 963 bp, Litoreibacter halocynthiae DSM 29467
atgctgatcgtgcccgagagggagatcgccaacctgatgaccagggacgccgccttcgacgccgtggagggcgtgttcgccgccatggccagcaaggacgcctacaacttccccgtgatcagggaggccatcggccacgaggacgccctgtacggcttcaagggcggcttcgacaaggccggcatgaccctgggcctgaaggccggcggctactggcccaacaacctggagaagcacggccacatcaaccaccagagcaccatcttcctgttcgaccccgacaccggcatggtgagcgccatggtgggcggcaacctgctgaccgccctgaggaccgccgccgccagcagcgtgagcatcaagcacctggccaggaaggacgccaaggtgatgggcatggtgggcgccggccaccaggccaccttccagctgagggccgccctggagcagaggcagttcgagaaggtgatcggctggaactaccaccccgagatgctgcccaacatcgagaagatcgccaacgaggccggcctgcccttcgaggccgtggagctggagggcatgagggaggccgacgtggtgatcagcatcaccagcaccttcgcccccaccatcatggccgaccacatcgcccccggcacccacatcgcctgcatgggcaccgacaccaagggcaagcaggaggtggaggccgccctgctggccagggccaccgtgttcaccgacgaggtggcccagagcatcagcatcggcgaggcccagcacgccgtggccgagggcctgatcaaggagagcgacgtgcaccagctgggcgccgtgatcaacggcacccacaagggcaggaccagcgacgacgagatcaccctgttcgacggcaccggcgtgggcctgcaggacctggccgtggccgccagcgtggtggagctggccgtgcagaagggcgtggccatcgaggtggacttc

SEQ ID NO: 288 - DNA, 987 bp, Roseivivax lentus DSM 29430
atgagcaacgagaaggacggcagcgtggtgatcgtgaccgaggagatctgccagaaggtggtggacagggccagcgccttcaccgccgtggagcaggtgttcggcgccatggccaagggcgacgcctacaacttccccgtgatcagggaggccatcggctacgccgacgccctgtacggcttcaagagcggcttcgacagggtgggcggcagcctgggcctgaagagcggcggctactggcccggcaacgccgagaagggcctgaccaaccaccagagcaccgtgttcctgttcgaccccgacaccggcaggctgcaggccctggtgggcggcaactacctgaccgccgtgaggaccgccgccagcagcagcgtgagcatcgcccacctggccaggaaggacgccaaggtgctgggcatggtgggcgccggccaccagagcgccttccagctgagggccgccgccgagcagagggacttcgagagggtggtggcctggaacccccaccccgacatgctgcccaagctgggcgaggtggccaaggacctgggcctggacttcgaggccgtgagccaggaggagctgggcgcccaggccgacgtgatcatcaccatcaccagcgccttcgagcccctgctgatggccgactggatcaagcccggcacccacatcgcctgcatgggcaccgacaccaagggcaagcaggaggtggacgccgccctgctggccagggccaccgtgttcaccgacgagatcgcccagagcatcagcatcggcgaggcccagcacgccgtgggccagggcctgatcgccgagggcgacatcacccccatcggcgccgtgatcaacggcgaccacaagggcaggaccagcgaggacgagatcaccctgttcgacggcaccggcgtgggcctgcaggacctggccgtggccagcgtggccgccaagctggccagggagaggggcatggcccagaccgtgatgctg

SEQ ID NO: 289 - DNA, 963 bp, Rhodovulum sulfidophilum DSM 2351
atgttcatcgtgcccgagaaggagatcgccggcctggtgagcgccgaccagtgcttcgaggccgtggaggccgtgttcgccgccatggccaggggcgacgcctacaacttccccgtgatcagggaggccatcggccacgccgaggccctgtacggcttcaagagcggcttcgacagggccggcagcgtgctgggcctgaagagcggcggctactggcccggcaacgccgccaagggcctgaccaaccaccagagcaccgtggtgctgttcgaccccgacagcggcaggcccgccgccctggtgggcggcaacctgctgaccgccctgaggaccgccgccgccagcgccgtgagcatcaggtacctggccaggagcgacgccagggtgctgggcgtgctgggcgccggccaccagagcgccttccagctgagggccgccgtggcccagaggaggttcgagaagatcgtgggctggaactaccaccccgagatgctgcccaggctggccgagaccgccgccgagctgggcctgcccttcgaggccgtgagcctggaggacctgggcgcccaggccgacgtgatcgtgaccatcagcagcagcttcagcgcccagctgatggacgcccacgtgaggcccggcacccacctggcctgcatgggcaccgacaccaagggcaagcaggagatcgaccccgccatcttcgccagggccagggtgttcgccgacgagatcgcccagagcgtggagatcggcgaggcccagcacgccgtggccgccggcctgatcgccgccgaggacatcgtggagatcggcgccgtgatcaacggcaccgcccccggcaggcagagcgacgacgagatcaccgtgttcgacggcaccggcgtgggcctgcaggacctggccgtggccgccagggccgtggccgccgccagggccaggggcctggccgtggaggtggacctg

SEQ ID NO: 290 - DNA, 975 bp, Roseobacter denitrificans DSM 7001; identical to SEQ ID NO: 5

SEQ ID NO: 291 - DNA, 963 bp, Leisingera sp. ANG-Vp
atgtacatcgtgcccgagaaggagatcgccggcctgatgaccagggaggccgccttcgacgccgtggagaaggtgttcgccagcatggccagcggcgacgcctacaacttccccgtggtgagggaggccatcggccacgaggacgccctgtacggcttcaagggcggcttcgacagggccggcctgaccctgggcctgaaggccggcggctactggcccaacaacctggagaagaggggcctgatcaaccaccagagcaccgtgttcctgttcgaccccgacaccggcaaggccaaggccatggtgggcggcaacctgctgaccgccctgaggaccgccgccgccagcagcgtgagcatcaagcacctggccaggaaggacgccaaggtgatcggcatgatcggcgccggccaccaggccaagttccagctgagggccgccctggagcagagggagttcgagaaggtgatcggctggaacctgcaccccgacatgctgcccaacctgcaggaggtggccgacgaggccggcctgcccttcgaggccgtggagctggacggcatgagggaggccgacgtgatcatcagcatcaccagcagcttcgacgccatcctgaacgccggccaggtgagccccggcacccacatcgcctgcatgggcaccgacaccaagggcaagcaggaggtggacccccagctgctggtggccgccgacgtgttcaccgacgaggtggcccagagcatcaccatcggcgaggcccagcacgccgtggcccagggcctgatccaggaggccgacgtggcccagatcggcgccgtgatcaacggcaccaaccccggcaggaccagcgacgaccagatcaccctgttcgacggcaccggcgtgggcctgcaggacctggccgtggccgccagcgtggtggacctggccgtggcccagggcatcgccatcgaggtggacttc

SEQ ID NO: 292 - DNA, 963 bp, Marivita hallyeonensis DSM 29431
atgtacatcgtgcccgaggccaagatcgccgacctggtgagcagggaggccagcttcgaggccgtggagcaggtgttcgccgccatggccagcaaggacgcctacaacttccccgtggtgagggaggccatcggccacgaggacgccctgtacggcttcaagggcggcttcgacagggtgggcggcagcctgggcctgaaggccggcggctactggccccacaacctggagaagaggggcctgatcaaccaccagagcaccgtgttcctgttcgaccccgacaccggcagggtgcacgccatggtgggcggcaacctgctgaccgccctgaggaccgccgccgccagcagcgtgagcatcaagcacctggccagggaggacgccaaggtgatgggcatgatcggcgccggccaccaggccaccttccagctgagggccgccctggagcagaggagcttcgagaaggtgatcggctggaactaccaccccgagatgctgcccaacatcgagaaggtggcccaggaggccggcctgcccttcgaggccgtggagctggagggcatgagggaggccgacgtgatcatcagcatcaccagcgccttcagccccagcctgatggccgaccacgtgagcgagggcacccacatcgcctgcatgggcaccgacaccaagggcaagcaggaggtggaggccgccctgctggccaaggccaaggtgttcaccgacgaggtggcccagagcatcagcatcggcgaggcccagcacgccgtgggcagcggcctgatcgccgagagcgacgtgatcgagatcggcgccgtgatcaacggcgcccaccccggcaggaccagcgacagcgacatcaccctgttcgacggcaccggcgtgggcctgcaggacctggccgtggccagcaaggtggtggagctggccatcgagaggggcgtggccatcgaggtggacttc

SEQ ID NO: 293 - DNA, 963 bp, Labrenzia alba CECT 7551
atgatcatcgtgcccgagaaggagatcgccggcctgatcggcagggtggaggccttcgaggccgtggagaacgtgttcgccgccatgagcagcggcgccgcctacaacttccccgtgatcagggaggccatcggccacgccgacgccctgtacggcttcaagagcggcttcgacaggagcagcctggccctgggcctgaagagcggcggctactggcccggcaacgccgacaagggcctgaccaaccaccagagcaccgtgttcctgttcgacgccgacaccggccaggccaaggccgtggtgggcggcaacctgctgaccgccctgaggaccgccgccgccagcgccgtgagcatcaagcacctggccagggaggacgccaaggtgctgggcatgatcggcgccggccaccagagcgccttccagatgaggagcgccgtggagcagaggaagttcgagaaggtgatcggctggaacttccaccccgagatgctgagcaggctggaggagaccgccaccgagctgggcctgccctacgagagcgtggacctggacaggatgggcaccgaggccgacgtgatcatcagcatcaccagcagcttcgaccccatcctgatggccgaccaggtgacccagggcacccacatcgcctgcatgggcaccgacaccaagggcaagcaggaggtggacaccggcctggtggccagggccaccctgttcaccgacgaggtggcccagagcgccaccatcggcgagtgccagcacgccgtggccgccggcatcgtgagcagggacaacatcaacgagatcggcgccgtgatcaacggcacccacagcggcaggaccagcgagagcgagatcaccctgttcgacggcaccggcgtgggcctgcaggacctggccgtggccagcgccgccgtggagctggccgtgcagaagggcgtggccatcgaggtggccttc

SEQ ID NO: 294 - DNA, 963 bp, Thalassobius abyssi DSM 100673
atgtggatcgtgcccgagagggagatcgccggcctggtgagcagggaggccgccttcgacgccgtggagcaggtgttcgccgccatggccgccggcagggccaacaacttccccgtggtgagggaggccatcggccacgagaacgccctgtacggcttcaagggcggcttcgaccagctgggcggcgccctgggcctgaaggccggcggctactggcccaacaacctggagaagaggggcctgatcaaccaccagagcaccgtgttcctgttcgaccccgacaccggcaggcccgtggccatggtgggcggcaacctgctgaccgccctgaggaccgccgccgccagcagcgtgagcatccagcacctgagcaggcccgacgccagggtgatcggcatggtgggcgccggccaccaggccaccttccagctgagggccgccctggagcagaggagcttcgagaaggtgatcggctggaacaggcaccccgagatgctgcccaacatccagaaggtggccgaggacgccgacctgcccttcgaggccgtggagctgggcgacctgagcgaggccgacgtgatcatcaccatcaccagcagcttcggccccatcctgatggtggaccacgtggcccccggcacccacatcgcctgcatgggcaccgacaccaagggcaagcaggaggtggaggccaggctgctggccaacagcctggtgttcaccgacgaggtggcccagagcatcagcatcggcgaggcccagcacgccgtggccagcggcgccctggccagcgacgccgtgatcgagatcggcagggtgatcaacggcgaccaccccggcaggcagagcgccgacgagatcaccctgttcgacggcaccggcgtgggcctgcaggacctggccgtggccgccaaggtggtggacctggccatcgagaagggcgtggccatcaaggtggacatc

SEQ ID NO: 295 - DNA, 963 bp, Roseovarius indicus B108 cultivar; identical to SEQ ID NO: 279

SEQ ID NO: 296 - DNA, 963 bp, Litoreibacter ponti DSM 100977
atgtacatcgtgcccgagagcgccatcgccgacctgatcagcgccgaggccagcttcgacgccgtggaggccgtgttcgccagcatggccaagggcgacgcctacaacttccccgtgatcagggaggccatcggccacgaggaggccctgtacggcttcaagggcggcttcgacggcaagggcatggccctgggcctgaaggccggcggctactggccccacaacctggagaagaggggcctgatcaaccaccagagcaccgtgttcctgttcgaccccgacaccggcagggtggccagcatggtgggcggcaacctgctgaccgccctgaggaccgccgccgccagcagcgtgagcatcaagcacctggccaggaaggacgccagggtgatgggcatgatcggcgccggccaccaggccaagttccagctgaggagcgccctgcagacccacgccttcgagaaggtgatcagctggaactaccaccccgagatgctgcccggcatggccgaggtggccgccgagttcgacctgcccttcgaggaggtgcagctggagggcatgaccgaggccgacgtggtgatcagcatcaccagcagcttcgcccccatcttcggccccgaccacatcgcccccggcacccacgtggcctgcatgggcaccgacaccatcggcaagcaggagtgcgaggccgagctgctggccagggccaccgtgttcaccgacgaggtggcccagagcatcagcatcggcgaggcccagcacgccgtgaaggccggcctgatcatggagaccgaggtgaaccagatcggcgacgtgatcaacggcgtgcacaagggcaggagcagcgacgacgagatcaccctgttcgacggcaccggcgtgggcctgcaggacctggccgtggcccagagcgtggtggagatcgccgtggagaggggcgtggccatcgaggtggacttc

SEQ ID NO: 297 - DNA, 963 bp, Yangia sp. CCB-MM3
atgctgatcgtgcccgagagggagatcgccagcctgatgaccagggacgccgccttcgccgccgtggagaaggtgttcgccgccatggccgccggcgacgcctacaacttccccgtggtgagggaggccatcggccacgaggacgccctgtacggcttcaagggcggcttcgacaggagcggcctgaccctgggcctgaaggccggcggctactggcccaacaacctggccaccaggggcatcatcaaccaccagagcaccgtgttcctgttcgaccccgacaccggcaaggccaaggccatggtgggcggcaacctgctgaccgccctgaggaccgccgccgccagcagcgtgagcatcaggcacctggccagggaggacgccagggtgatcggcatggtgggcgccggccaccaggccaccttccagctgagggccgccctggagcagagggagttcgacaaggtgatcggctggaacctgcaccccgagatgctgcccaacctggagaaggtggccgccgaggccggcgtgcccttcgaggccgtggacctgcccggcatgagggaggccgacgtgatcatcagcatcaccagcagcttcgacgccatcctgatggccgagcacgtgagccccggctgccacatcgcctgcatgggcaccgacaccaagggcaagcaggaggtgagccccgccctgctggccaaggccaccgtgttcaccgacgaggtggcccagagcgtgagcatcggcgaggcccagcacgccgtggcccagggcctgatcgacgagagcgccatcacccagctgggcgccgtgatcaacggcgcccaccccggcagggccagcgccgaggagatcaccctgttcgacggcaccggcgtgggcctgcaggacctggccgtggccgccgccgtggtggacctggccgtggagaagggcatcgccatcgaggtggacttc

SEQ ID NO: 298 - DNA, 963 bp, Granulosicoccus antarcticus IMCC3135
atgttcgtggtgagcgaggaggtgtgcaggaaggtggtgagcagggccgacgccttcgacgccgtgcaggccgtgttcgccgccatggccaggggcgacgccaggaacttccccgtggtgagggaggccctgggccacgccgacgccctgtacggcttcaagagcggcttcgacagggccggcctggccctgggcgtgaagagcggcggctactggcccggcaacgcccagaagggcctgaccaaccaccagagcaccgtgttcctgttcgaccccgacaccggccagctgcaggccctggtgggcggcaactacctgaccgccatcaggaccgccgccgccagcgccgtgagcatcgcccacctggccaggaaggacgccagggtgctgggcatgatcggcgccggccaccaggcccagttccagctgagggccgccgccgagcagaggcagttcgagaaggtgatcgcctggaacctgcaccccgagaagctgagcatcctggaggccgtggccaccgagctgggcctgcccttcgaggccgtgggcaggcagcagctggccgagcaggccgacaccatcatcaccatcaccagcgcccacgaggccctgctggacagcggctggatcaggcccggcacccacatcgcctgcatgggcaccgacaccgccggcaagcaggagctggacccccagctgttcagcgacgccagcgtgttcaccgacgagctggcccagagcatcaccatcggcgaggcccagcacgccttcaaggccggccagctgcaggaggccgacatcaccgccctgggcgccgtgatcaacggcgaccaccccggcagggtgaccgacgacgagatcaccgtgttcgacggcaccggcgtgggcctgcaggacctggccgtggccgccgtggccctgagggtggcctgcgaggagggcgacgccaaggagatcgccctg

SEQ ID NO: 299 - DNA, 963 bp, Tateyamaria omphalii DOK1-4
atgctgatcgtgcccgagaaggacatcgccgacctgatgaccagggacgccgccttcgacgccgtggagcaggtgttcgccgccatggccagcgacgacgcctacaacttccccgtggtgagggaggccatcggccacgaggacgccctgtacggcttcaagggcggcttcgacagggccggcgccaccctgggcctgaaggccggcggctactggccccacaacctggagaagagggacctgatcaaccaccagagcaccgtgttcctgttcgaccccgacaccggcaagcccgccgccatggtgggcggcaacctgctgaccgccctgaggaccgccgccgccagcagcgtgagcatcaagcacctggccaggcccgacgccaaggtgctgggcatgatcggcgccggccaccaggccaccttccagctgagggccgccctggagcagagggccttcgacagggtgatcggctggaactaccaccccgacatgctgcccaacatcgccaaggtggccgaggacgccggcctgcccttcgaggccgtggacctgcccggcatggccgaggccgacgtgatcatcagcatcaccagcgccttcgcccccagcctgatggccgaccacgtgagccccggcacccacatcgcctgcatgggcaccgacaccaagggcaagcaggaggtggaggccgccctgctggccagggccaccgtgttcaccgacgaggtggcccagagcatcagcatcggcgaggcccagcacgccatcgccgccggcctgatcgccgagagcgacatccaccagatcggcgccgtgatcaacggcgcccaccccggcaggaccagcgacaccgacatcaccctgttcgacggcaccggcgtgggcctgcaggacctggccgtggccgccagggtggtggacctggcccagaagaagggcatcgccatccacgtggacttc

SEQ ID NO: 300 - protein, 292 aa, Silicibacter pomeroyi DSS-3 megaplasmid
MAAGTARNFPVIREAIGHADALYGFKSGFDRQALNLGLKSGGYWPGNADKGLTNHQSTVFLFDADTGRCQAVVGGNLLTALRTAAASSVSIKHLARQDAKVIGMIGAGHQAKFQLRAALEQRNFEKVIGWNLHPEMLVNLQEVADEAGLPFEAVELDGMREADVIITITSSFDAILKADQVSPGTHIACMGTDTKGKQEVDPQLLVMADVFTDEVAQSISIGEAQHAVAHGLIQAADVAQIGAVINGTNPGRTSDAQITLFDGTGVGLQDLAVAATVVERARAAGAGTEIAF

SEQ ID NO: 301 - protein, 321 aa, Silicibacter sp. TM1040
MYIVPERVIADLMTREAAFDAVEKVFAAMAAEDAYNFPVVREAIGHEDALYGFKGGFDRAGLTLGLKAGGYWPHNLEKRGQINHQSTVFLFDPDTGKAHAMVGGNLLTALRTAAASSVSIKHLARDDAKVIGMIGAGHQATFQLRAALEQRNFEKVIGWNLHPEMLPNIEAVAAEAGLPFEAVELDGMRAADVIISITSSFEASLMADHVSPGTHIACMGTDTKGKQEVDPALLVRAEVFTDEVAQSVGIGEAQHAVAQGLIEAADLTQLGAVINGAHPGRSTDDQITLFDGTGVGLQDLAVAARVVELAVTQGIAMEVDF

SEQ ID NO: 302 - protein, 321 aa, Loktanella vestfoldensis SKA53
MIIVPEKEIAGLMTRADAYNAVEQVFASMSSGRAYNFPVIREAIGHADALYGFKSGFDRDGLALGLKSGGYWPGNEANGLTNHQSTVFLFDADTGKCRAIVGGNLLTALRTAAASAVSINHLARKDASVLGMIGAGHQSVFQLRAAVEQRSFDKIIGWNYHPEMLQRLAAVAAELGIPFEAVSLAQLGAEADVIISITSAFAPSLLDIHVRPGTHIACMGTDTKGKQELEAAVLARATVFTDEVAQAVTIGEAQHAIAAGLITQDAIHEMGAVVNGTHPGRTSPDEITVFDGTGVGLQDLAVASAVVDLAVAKGVATTVEF

SEQ ID NO: 303 - protein, 320 aa, Paracoccus denitrificans PD1222 chromosome 2
MLVVAEKEIAGLMTPEAAFEAIEAVFASMARRKAYNFPVVREAIGHEDALYGFKGGFDASALVLGLKAGGYWPNNQKHNLINHQSTVFLFDPDTGRVSAAVGGNLLTALRTAAASAVSIKYLAPKGAKVLGMIGAGHQSAFQMRAAANVHRFEKVIGWNPHPEMLSRLADTAAELGLPFEAVELDRLGAEADVIVSITSSFSPLLMNEHVKGPTHIAAMGTDTKGKQELDPALVARARIFTDEVAQSVSIGECQHAIAAGLIREDQVGELGAVVAGDDPGRGDAEVTIFDGTGVGLQDLAVAQAVVELAKHKGVAQEVEI

SEQ ID NO: 304 - protein, 325 aa, Roseobacter denitrificans OCh 114
MSKGLLIVGEDICAEVVSSADAFTAVEAVFGAMAKGDAYNFPVIREAIGYADALYGFKSGFDKAGKTLGVKSGGYWPGNMDKGLTNHQSTIFLFDPDTGMLEALVGGNYLTAVRTAASSSVSIAHLARKDAKVLGMVGAGHQSTFQLRAAAEQRDFEKVVAWNPHPDMLPRLGAVAEELGLAFEAVTQEELGAQADVIITITSAFEPLLMKDWIKPGTHIACMGTDTKGKQEVDPELLVSATVFADEIAQSVTIGEAQHAVASGRLSDAEITPIGAVINGTHAGRSSDQQITLFDGTGVGLQDLAVASVAAREAESRGKATRIAL

SEQ ID NO: 305 - protein, 321 aa, Ahrensia sp. R2A130 contig00014
MIIVPEKEIGGLVTREAAFDAVESVFAAMASGDAYNFPVIREAIGHVDALYGFKGGFDKAGMSLGLKAGGYWPNNLDTKGIINHQSTVFLFDPDTGQVSAMVGGNLLTALRTAAASSVSIKHLARKDAKVLGMIGAGHQAKFQLRTALEHRDFEKVIGWNLHPEMLPNLEEVAAEAGLPFEAVELSGMTEADVIITITSSFDATMMGDHVAPGTHVACMGTDTKGKQEVGVDLIAKATLFADEIAQSISIGECQHAIADGSIKEADITPIGAVINGTHTGRMSDDEITLFDGTGVGLQDLAVASAAVVLAKAQGKAIEVEL

SEQ ID NO: 306 - protein, 330 aa, Dinoroseobacter shibae DFL-12
MLQKPDTDGLVIVTEEICQKVIDRDLAFAAVRDVFGAMARGDAYNFPVIREAIGHEDALYGFKSGFDKAGMVLGVKAGGYWPNNMAKGIINHQSTVFLFDPDTGKLKALVGGNYLTAIRTAASSAVSIDQLARKDAKVLGMVGAGHQSTFQLRAAVEQRDFEKVVCWNPHPDMIPNLGKVAAEIGIPFEAVSREELGAQSDVIITITSAFEPLIEAGYIKPGTHLACMGTDTKGKQEVAAELVAKATLFTDEVAQSTTIGETQHAIASGAITQDDVTPIGKVINGDHPGRTSDDEITLFDGTGVGLQDLAVAAVAAEQAVATGAATRVSL

SEQ ID NO: 307 - protein, 321 aa, Octadecabacter arcticus 238
MYIVPESAIADILTRPDAFNAVEQVFAAMSAGVAYNFPVIREAIGHEEALYGFKGGFDGKGMSLGLKAGGYWPHNLEKRGIINHQSTVFLFDPDTGKVAAMVGGNLLTALRTAAASSVSIKHLARKDSKVMGMIGAGHQAKFQLRHALETHSFEKVIGWNYHPEMLPSLAEVAAEFDLPFEAVTLEGMTEADVVISMTSSFNPIFGAAHISDGTHIACMGTDTIGKQECETDLIVKATVFTDEVAQSVTLGETQHAVSAGLKSRDDIFELGAVINGTHAGRTSDREITLFDGTGVGLQDLAVAASIVEIAKAKGIGMDVDF

SEQ ID NO: 308 - protein, 321 aa, pDaep_A276
MYIVPEKAVADLVTREASFDAVEKVFAAMASGDAYNFPVVREAIGHEDALYGFKGGFDRAGLTLGLKAGGYWPNNLEKRGLINHQSTVFLFDPDTGKVKAMVGGNLLTALRTAAASSVSIKHLARQGAKVIGMIGAGHQATFQLRAALEQRPFEKVIGWNYHPEMLPNIEKVAAEAGVPFEAVDLPGMADADVIISITSAFAPSLMADHVSPGTHIACMGTDTKGKQEVEAELLVKATVFTDEVAQSISIGEAQHAVAQGLIQESDVAQIGAVINGTNPGRTSDDQITLFDGTGVGLQDLAVAASVVEVALEKGIAIEVDF

SEQ ID NO: 309 - protein, 320 aa, Paracoccus sp. J56
MYVVAEKEIAGLMNPEAAFEAIEAVFAAMARRKAYNFPVVREAIGYEDALYGFKGGFDASGLALGLKAGGYWPNNQKHGLINHQSTVFLFDPDTGRVSAAVGGNLLTALRTAAASAVSIKYLAPKGAKVLGMIGAGHQSAFQMRAAANVHGFEKVIGWNPHPEMLSRLADTAAELGLPFEAVDLPQLGEEADVIISITSSFSPLLLNEHVKGPTHIAAMGTDTKGKQELDPALVTRARIFTDEVAQSISIGECQHAIAAGLIKEEQISELGAVVTGDNPGRADAEVTLFDGTGVGLQDLAVAQKVLEIAKEKGIAQQVEI

SEQ ID NO: 310 - protein, 331 aa, Paracoccus aminophilus JCM 7686
MAGFSTRKGLLMYIVAEKEIAGLMTPAAAFEAIEAVFAAMAARKAYNFPVVREAIGYEDALYGFKGGFDGAALTLGLKAGGYWPNNQKHNLINHQSTIFLFDADTGRAKAAIGGNLLTALRTAAASAVSIKYLAPKGAKVLGMIGAGHQSAFQMKAAAAVHSFEKVIGWNPHPEMLTRLAETAAGLGLPFEAVELDRLGAEADVIISITSAFSPLLMDAHVKGETHIAAMGTDTKGKQELDPALVARARIFTDEVAQSISIGETQHAIAAHLIAEEAVHELGAVVTGAIPGRDGAEVTLFDGTGVGLQDLAVAAKVLELAIEKGLAQQAEL

SEQ ID NO: 311 - protein, 321 aa, Rhizobium rhizogenes YR147
MIIVPENEIAGLVTPADCLKAVEGVFASMANKSAYNFPVIREAIGHADALYGFKSGFDRKGLALGLKAGGFWPNNVHKGLTNHQSTVLLFDADTGKCRAVVGGNLLTALRTAAASAISIKYLARKDAKVLGMIGAGHQATFQLRAALAQRPFEKIVGWNLHPDMLCRLEEVAKEEGLPFEAVDLDRLGAEADVIISITSSFAPMLKASQVRAGTHLACMGTDTKGKQEVEAEILAAATVFTDEVAQAITIGESQHAIERGLIREEAIVEIGAVINGTHPGRTSADQITLFDGTGVGLQDLAVASAAVELALAKGVAIEVDF

SEQ ID NO: 312 - protein, 320 aa, Roseinatronobacter thiooxidans DSM 13087
MWIVPESVIADLVDEHSAFDAIEASFAAMARGDAYNFPVVREALGAGRQYGFKSGLDRVGALLGVKAGGYFPGNADRGIPNHQSTVYLFDQDSGKPTAIVGGNLLTALRTAAASAISIAHLARKDAKVLGMVGAGHQSAFQMRAAVRQRQFDRVIGWNLHPDMLSRLAETAAELGLPFEAVDLDQLGAQADVIITITSSFDAILQDAHIRPGTHLACMGTDTKGKQELDPAILTRATVFTDEVAQSISIGEAQHAVGAGILHADAIVEIGAVINGTHHGRRDAQEITVFDGTGVGLQDLAVASRAVALAIERGLAQKIDF

SEQ ID NO: 313 - protein, 321 aa, Citreicella marina DSM 26424
MLIVPEREIADLMTRDAAFAAVEQVFAAMAADKAYNFPVVREAIGHEDALYGFKGGFDRAGLTLGLKAGGYWPNNMDKRGLINHQSTVFLFDPDTGKVRAMVGGNLLTALRTAAASSVSIRHLARKDAKVIGMIGAGHQATFQLRAALEQRGFEKVIGWNYHPEMLPNIEKVATEAGLPFAAVDLPGMAEADVIITITSAFAPSLLAEHVSPGTHIACMGTDTKGKQEVEAALLARATVFADEIAQSVSIGEAQHAIAEGLLQEADIAQLGAVINGTHPGRKDAAEITLFDGTGVGLQDLAVAAAVVDLAVAQGRAIEVDF

SEQ ID NO: 314 - protein, 324 aa, Ruegeria marina CGMCC 1.9108
MSEVLIVGEEICQQIVGRAEAFAAVEAVFAAMDRGEARNFPVVREALGHARALYGFKSGFDQAGHVLGVKSGGYWPGNMDRGLTNHQSTVFLFDPDTGQLSALVGGNYLTAVRTAASSAVSIAHLARRDARVLGMVGAGHQSTFQLRAAAEQRAFEKVVAWNPHPEMLPRLAVVAEELGLEFEAVSPQELGAQADVIISITSAFEPLLMSGWIRPGTHLACMGTDTRGKMEVDSALLARATVFTDEVAQSVSIGEAQHAVSQGLIGAEDITPIGAVINGGHPGRGSEADITLFDGTGVGLQDLAVASVAAKLAVERGLGARASL

SEQ ID NO: 315 - protein, 321 aa, Ruegeria marina CGMCC 1.9108
MLIVPERDIADLMTREAAFDAVEKVFAAMASGDAYNFPVVREAIGHEGALYGFKGGFDRADLTLGLKAGGYWPNNLEKRGLINHQSTVFLFDPDTGKPSAMVGGNLLTALRTAAASSVSIKHLARADAKVIGMIGAGHQATFQLRAALEQRTFEKVIGWNYHPEMLPNIEKVAAEAGLPFEAVDLPGMAGADVIISITSAFAPSLMADHVSPGTHLACMGTDTRGKQEVEAGLLARATVFTDEVAQSISIGEAQHAISDGLIKESDIAQLGAVINGTHPGRTSEDQITLFDGTGVGLQDLAVAAAVVDLAVDRGIAIEVDF

SEQ ID NO: 316 - protein, 326 aa, Thalassobacter sp. 16PALIMAR09
MKSHEIIIVPEAEIAGLMTPEAAFDAVEAIFGAMARKDAYNFPVIREAIGHADALYGFKSGFDRAGGALGLKSGGYWPGNEAKGLTNHQSTVILFDRDTGRPKAMVGGNLLTALRTAAASAVSIKHLARADSKVLGMIGAGHQSAFQMRAALSQRPFEKVIGWNYHPEMLSRLEAVATEAGLPFEAVDLDRLGAEADVIISITSSFDAILQDAQVTAGTHVACMGTDTKGKQEVEAALVARATVFTDEIAQSTTIGEAQHAIASGLITEAAITEIGAVINGTHPGRTSAEEVTLFDGTGVGLQDLAVAEAVVDLALKTGVATRVPF

SEQ ID NO: 317 - protein, 320 aa, Salinihabitans flavidus DSM 27842
MIIVPEREIAGLITPEAAFDAVENVFGAMARGEALNFPVIREAIGHADALYGFKSGFDRAGLVMGLKSGGYWPGNADKGLTNHQSTVILFDPDTGRATALVGGNLLTALRTAAAAAVSIRHLARPDAKVLGMIGAGHQSTFQMRAALAQRRFERVIGWNLHPERLSRLQEVAQEHDLPFEAVDLPQMREADVIITITSSFDPILMSDHVADGTHIASMGTDTKGKQELEPALVARARRFTDEVAQSVSIGECQHAVAAGLIGADDIAEIGAVINGTYPGREGAREVTLFDGTGVGLQDLAVAAAAVRLAGEKGVAIEVDF

SEQ ID NO: 318 - protein, 320 aa, Paracoccus alcaliphilus DSM 8512
MWIVPEGEIAGLMTPEAAFDAVEAVFAAMARGDASNFPVVREAIGHEDALYGFKGGFDGAGMTLGLKAGGYWPNNAKHGIINHQSTVFLFDPDTGRVSAAVGGNLLTALRTAAASAVSSKYLAPKGAKVLGMIGAGHQSAFQMKAAVRFGDFDRVIGWNPHPEMLTRLADTAAELGLPFEAVELDRLGADADVIISITSAFEPLLLDAHVTGPTHIAAMGTDTKGKQELDPVLVARSRLFTDEVAQSVSIGEFQHAAAQKLISEGDVIALGQVINGQHEGRGDAEVTIFDGTGVGLQDLAVAAAVVELAKQQGKAIEVAI

SEQ ID NO: 319 - protein, 327 aa, Paracoccus sp. PAMC 22219
MQTQSPLLIVPEHLIADLISAQDCFAAVEQVFAAMARDTAYNFPVIREAIGHADALYGFKSGFDRESLALGLKSGGFWPRNADKGLTNHQSTIFLFDADTGRCRAVVGGNLLTALRTAAASAVSIRHLARPDARVLGMIGAGHQSTFQLRAALDQRDFDKVVGWNLNPADLDRLAKVAGERGIPFQAVDLDQLGAQADVIITITSSFAPILQAAQVRPGTHLACMGTDTKGKQEVEAALLAKASVFTDEVAQSVTIGEAQHAVAQGLIAEGDITQIGAAINGDRPGRVSDDQITLFDGTGVGLQDLAVASAAVDLAVERGIAIQVQI

SEQ ID NO: 320 - protein, 321 aa, Loktanella sp. 5RATIMAR09
MIIVPEKEIAGLLTRADAFDAVEKVFASMSKGSAYNFPVIREAIGYEDALYGFKGGFDKAGMALGLKAGGYWPNNLEKHGHINHQSTVFLFDPDTGMVKAMVGGNLLTALRTAAASSVSIKHLARKDAKVMGMVGAGHQATFQLRAALEQRNFEKVIGWNYHPEMLPNIEKVANEAGVPFEAVPLEGLAEADVVISITSTFAPTIMADHIAPGTHIACMGTDTKGKQEVEASLLARATVFTDEVAQSISIGEAQHAVASGLIEQSDVHELGAVINGTHPGRTSADEITLFDGTGVGLQDLAVASSIVDLAVEKGIAIIVDF

SEQ ID NO: 321 - protein, 332 aa, Psychrobacter urativorans R310.10B
MIEENNINNEGLLIVSEDACKAVIDRDSAFTAVKNVFASMSRGDAYNFPVIREAIGYADALYGFKSGFDRAGKSLGLKSGGYWPGNAAKGLTNHQSTIFLFNPDNGKLRALVGGNYLTAVRTAAASAVSIAHLARKDSKVLGMVGAGHQSTFQLRAALEQRNFEKVIAWNKDADRLSILQEIAEELGIPFESVEREQLCAEADVIITITSAFEPLLMKEWIKPGTHIACMGTDTVGKQEVDAALIVSATVFTDEIAQSISIGEAQHAIKSGAITADAITTLGDVINGEHPGRSSDDEITLFDGTGVGLQDLAVASAAARLAVEKGQAQHISL

SEQ ID NO: 322 - protein, 321 aa, Octadecabacter temperatus SB1
MYIVPEAAIADILTRDAAFDAVENVFAAMSAGDAYNFPVIREAIGHEDALYGFKGGFDGKGMSLGLKAGGYWPHNLAERGLINHQSTVFLFDPDTGKVAAMVGGNLLTALRTAAASSVSIKHLARKDSKVMGMIGAGHQAKFQLRAALETHQFEKVIGWNRNANALSTLADVAAEFDLPFEAVSLEGMVEADVVISITSVFSPIFGAAHISDGTHVACMGTDTIGKQEADTDLVTKATVFTDEVAQSVTLGEAQHAVGAGLKSREDIHELGAVINGTHKGRTSDTEITLFDGTGVGLQDLAVSASIVEIAKAKGIGLEVDF

SEQ ID NO: 323 - protein, 321 aa, Leisingera sp. ANG-S
MYIVPEKAIADLVTREASFDAVEKVFAAMAAGDAYNFPVVREAIGHEDALYGFKGGFDRAGLTLGLKAGGYWPNNLEKRGLINHQSTVFLFDPDTGKVKAMVGGNLLTALRTAAASSVSIKHLARQDAKVIGMIGAGHQATFQLRAALEQRQFEKVIGWNYHPEMLPNIEKVAAEAGLPFEAVDLPGMAEADVIISITSAFAPSLMADHVSPGTHVACMGTDTKGKQEVEAELLVKASVFTDEVAQSISIGEAQHAVAQGLIQESDVAQIGAVINGTNPGRTSDDQITLFDGTGVGLQDLAVAASVVEVAVEKGIAIEVDF

SEQ ID NO: 324 - protein, 334 aa, Neptunomonas antarctica DSM 22306
MLAPVDPPTNKKGISIVSEDVCQQTVGRPEAFTAVENVFAAMARGDAYNFPVVREAIGHADALYGFKSGFDRAGMSLGVKSGGYWPGNAAKGLTNHQSTIILFDPDTGQIKSIVGGNYLTAVRTAASSAVSIAHLARKDAKVLGMIGAGHQSTFQLRAAVEQRDFEKVLAWNPHPKNLVRLATVCAELGLPFEAVEREQLCAEADVIITITSAFEPLLRHEWIKPGTHIACMGTDTKGKQEVDPALLVAATLFTDEIAQSISIGEAQHAVASGALKAGDITSLGDVINGDHCGRSSAEEITLFDGTGVGLQDLAVASVAVQLADERKLSSKISL

SEQ ID NO: 325 - protein, 321 aa, Sinorhizobium fredii CCBAU 83753
MIIVPENQIAGLMTPADCLVAVEEVFASMAKRSAYNFPVIREAIGYADALYGFKSGFDRSNLALGLKSGGFWPNNVQIGLANHQSSVFLFDADTGKCRAVVGGNLLTALRTAAASAISIKHLARKDAKVLGMIGAGHQSAFQLRAAVEQRSFEKILAWNLHPEMLSRLAEVAMELKLPFKIVDLERLGAESDVIISITSSFAPIFKASQVRPGTHLACMGTDTKGKQEMEAELVAAATVFTDEVAQAVTIGECQHAIEKKLLSRDDITELGAVITGRHPGRSSPDEITLFDGTGVALQDLAVASAAVAHAVSRGTAIEVDF

SEQ ID NO: 326 - protein, 321 aa, Defluviimonas indica DSM 24802
MLIVPEREIADLMTREAAFDAVEKVFAAMASGDAYNFPVIREAIGHEDALYGFKGGFDRAGLTLGLKAGGYWPNNLERHGLINHQSTVFLFDADTGMVKAMVGGNLLTALRTAAASSVSIKHLARRDAKVLGMVGAGHQATFQLRAALEQRAFEKVIGWNYHPEMLPRIEKVAAEAGVPFEAVELDGMREADVIISITSAYAASLMAKHVSPGCHVACMGTDTKGKQEVEAALLARATVFTDEIAQSVTIGEAQHAIAEGLIGESDIAQLGAVINGTLPGRTSQEQITLFDGTGVGLQDLAVAASVVALAVEKGAAIEVDF

SEQ ID NO: 327 - protein, 328 aa, Marinomonas sp. S3726
MSTENKGVSIVSEKTCQAVVGRPEAFTAVENVFAAMAKNSAYNFPVVREAIGHADALYGFKSGFDRDGMVLGVKAGGYWPGNAQQGITNHQSTVILFDPDTGKIKSLVGGNYLTAVRTAASSAVSIAHLARKDSKVLGMVGAGHQSTFQLRAAVEQRDFEKVVAWNFHPDMLPNLEKVCVELGLPFEAVSREELGAQADVIITITSAFESLMQKDWIKPGTHIACMGTDTKGKQEVDADLLAAATVFTDEVAQSISLGEAQHAIESGLIQISDITPIGEVINGTHQGRTSEDEITLFDGTGVGLQDLAVASAAADLAEAQGKANFIDL

SEQ ID NO: 328 - protein, 321 aa, Oceanicola flagellatus CGMCC 1.12644
MLIVPEREIANLMTRSAAFDAVESVFAAMASKNAYNFPVIREAIGHEDALYGFKGGFDKQGMTLGLKAGGYWPNNLEKHGVINHQSTIFLFDPDTGMVKAMVGGNLLTALRTAAASSVSIKHLARKDAKVMGMVGAGHQATFQLRAALEQRPFEKVIGWNYHPEMLPNIEKVANEAGVPFEAVELDGMVEADVVISITSTFEPTVMAKHISPGTHIACMGTDTKGKQEVEAALLGKATVFTDEVAQSITIGEAQHAIYNHMIRPENIVQIGEVINGTHKGRTSDDEITLFDGTGVGLQDLAVAASVVELAVKNGVAIEVDF

SEQ ID NO: 329 - protein, 321 aa, Phaeobacter inhibens S4Sm
MRIVPEAIIKDHISREDSFEAVEQVFASMAARSAYNFPVIREAIGHADALYGFKSGFDRNALNLGLKSGGYWPGNSEKGLTNHQSTVFLFDADTGKCSAIVGGNLLTALRTAAAAAVSVAHLARKDAEVLGIVGAGHQASFQLRAVAEQRDFKKVVAWNRSPEKLATLEQVARELGLPFEAVSVEDLCAQSDVIVTITSSFDAIIHSDQVRPGTHIACMGTDTKGKQEVDAALVARSSVFTDEIAQSTTIGEAQHAVAIGSLSEAAIVELGAVINGAHPGRGSADEVTLFDGTGVGLQDLAVAATVVERASKAGAAIDVDF

SEQ ID NO: 330 - protein, 321 aa, Brevirhabdus pacifica DSM 27767
MYVVPESAIADLISPQDSFEAVESVFAAMARKDAYNFPVIREAIGHADALYGFKSGFDRAGLVLGLKAGGYWPGNADKGLTNHQSSVFLFDPDTGRPTAMVGGNLLTALRTAAASAVSIRYLAPKGAKVLGMIGAGHQSAFQMRAAAKQRDFEKVIGWNFHPEMLSRLEETAAELGLPYESVDLDRMGAEADVIVSITSSFDPILKDAQVKGGTHLACMGTDTKGKQEVEAALLARARVFTDEIAQSITIGEAQHAVADGSLAESDITEIGAVIAGMDPGRRSDDEITLFDGTGVGLQDLAVAAKAVELARERGIGQEIEV

SEQ ID NO: 331 - protein, 321 aa, Methylobacterium radiotolerans SB3
MIIVPEHAIDGLLTEAECFGAVEQVFASMARRRAGNFPVVREAIGHADALYGFKSGFDRDSLALGLKAGGFWPGNAAKGLTNHQSTVFLFDADTGRCRAVVGGNLLTALRTAAACAISIRHLAREGARVLGMIGAGHQSAFQLRAALVQRPFERVLAWNLHPGMFGRMEAVARERGVPFEVVDLDRLGAEADVVVTITSSFAPILKAAQVRPGTHVACMGTDTRGKQEVEAELLAAATVFTDEVAQSVSLGEAQHAVARGLLAADSIVEIGAVINGDHPGRVSDAEITVFDGTGVGLQDLAVAAVAVDRALAKGLATEVGF

SEQ ID NO: 332 - protein, 321 aa, Pelagimonas varians DSM 23678
MLIVPERDIADLMTRDAAFDAVERVFAAMAAGDAYNFPVVREAIGHEEALYGFKGGFDQSGLTLGLKAGGYWPNNLEKRGIINHQSTIFLFDPDTGKVKAMIGGNLLTALRTAAASSVSIKHLARPDAKVIGMIGAGHQATFQLRAALEQRNFEKVIGWNYHPDMLPNIEKIATEAGVPFEAVELEGMRQADVIISITSAFAPSLMADHVAPGTHVACMGTDTKGKQEVEAALLAKAAVFTDEVAQSITIGEAQHAVAQGLIAEADVAQLGAVINGTDAGRTSEDQITLFDGTGVGLQDLAVAAAVVDLAVEQGIAIEVDF

SEQ ID NO: 333 - protein, 321 aa, Thalassobius mediterraneus 5120
MHIVPERDIADLMTRAAAFDAVEKVFAAMAAEDAYNFPVIREALGHEEALYGFKGGFDRAGSTLGLKAGGYWPHNLEKRGLINHQSTVFLFDPDTGKVSAMVGGNLLTALRTAAASSVSIKHLAREDAKVIGMVGAGHQATFQLRAALEQRSFEKVIGWNLHPEMLPNLEKVAAEAGLPFEAVDLPGLKEADVVITITSSFDPIVLSEHISDGTHVACMGTDTIGKQEVAADLLTRATVFTDEVAQSTTLGEAQHAVANGSLTADQITQLGAVINGTHGGRASDREVTLFDGTGVGLQDLAVAARVVELAIEKGTAIEVDF

SEQ ID NO: 334 - protein, 321 aa, Jannaschia sp. CCS1
MYIVPERAIADLMTREAAFDAVEKVFAAMAAGDAYNFPVVREAIGHEDALYGFKGGFDQAGLTLGLKAGGYWPNNLEKRDLINHQSTVFLFDPDTGKAKAMVGGNLLTALRTAAASSVSIKHLARDDAKVIGMIGAGHQATFQLRAALEQRTFEKVIGWNYHPDMLPNIEKVATEAGVPFEAVDLPGMAEADVIISITSAFAPSLMADHVAPGTHIACMGTDTKGKQEVEAALLARATVFTDEVAQSVSIGEAQHAVADGLIAEGDVHQLGAVINGTHAGRASADEITLFDGTGVGLQDLAVAASVVDLAIKKGVAIEVDF

SEQ ID NO: 335 - protein, 321 aa, Mesorhizobium sp. BNC1
MIIVPEREISGLISAADCFTAVEQVFASMARKSATNFPVIREAIGHAGALYGFKSGFDRESLALGLKSGGFWPNNVEKGLTNHQSTIFLFDADTGRCRAVVGGNLLTALRTAAASAVSIKYLARRDAQVIGIVGAGHQSTFQLRAALDQRAFKKVVGWNIDPEMLSRLQVVAAERNIPFESVDLDRLGAEADVIITITSSFASLLKAAQVRPGTHLACMGTDTKGKQEVEAELVAMATVFTDEVAQSISIGEAQHAVEKGLLAAGDIIELGQVINGMHPGRSSDDEITLFDGTGVGLQDLAVASAAVDLAIARGVALEVDF

SEQ ID NO: 336 - protein, 321 aa, Mesorhizobium sp. BNC1 plasmid 1
MIIVPERLISDLMSEAAVFEAIESVFAAMARDEARNFPVIREAIGYADALYGFKAGFDSAGLVLGVKAGGYWPGNMAKGLTNHQSTVLLFDPDTGRIKAAVGGNLLTALRTAAASAVSIKHLARPDARVLGMVGAGHQSAFQMRAAVRARKFDKVVGWNLHPEMLSRLADTAVELGLPFEVVDLPQLGAQADVIITITSSFAPILLSGHIRPGTHLACMGTDTKGKQEVEAALFPRARLFADEVEQSVTIGEAQHAVAQGLIATGDITPLGAVIAGLAPGRTSPEEITLFDGTGVGLQDLAVASVAVDIARARGLALEVEL

SEQ ID NO: 337 - protein, 333 aa, Roseovarius sp. TM1035
MNTHKEVAADGFVIVGEEICQKIISRADAFGAVEAVFAAMARGDAYNFPVVREAIGHADALYGFKGGFDRSGLSLGLKAGGYWPGNMDKGLTNHQSTVFLFDPDTGRLSALVGGNYLTAIRTAASSSVSIAHLARKDAKVLGMVGAGHQSAFQLRAAVEQRAFEKVVAWNPHPDMLPRLGAVAKELGLEFEAVTQEELGAQADVIITITSAFEPLMMADWVKPGTHIACMGTDTKGKQEVDPALFTRATVFADEIAQSITIGEAQHAVGKGLIAEGDITPIGAVINGTHGGRSNAEEITLFDGTGVGLQDLAVASVAAKLAREQGLVTPITLG

SEQ ID NO: 338 - protein, 321 aa, Methylobacterium radiotolerans JCM 2831 plasmid pMRAD01
MIIVPEHAIDGLLTEAECFGAVEQVFASMARRRAGNFPVVREAIGHADALYGFKSGFDRDSLALGLKAGGFWPGNAAKGLTNHQSTVFLFDADTGRCRAVVGGNLLTALRTAAACAISIRHLAREGARVLGMIGAGHQSAFQLRAALAQRPFERVLAWNLHPGMFGRMEAVARERGVPFEVVDLDRLGAEADVVVTITSSFAPILKAAQVRPGTHVACMGTDTRGKQEVEAELLAAATVFTDEVAQSVSLGEAQHAVARGLLAADSIVEIGAVINGDHPGRVSDAEITVFDGTGVGLQDLAVAAVAVDRAVAKGLATEVDF

SEQ ID NO: 339 - protein, 347 aa, Rhizobium sp. NGR234 plasmid pNGR234b
MACLGSGQGVLTKEGHRPSCNQSEGKMIIVPESQIPALVTSADCFVAVEDVFASMSKQSAYNFPVIREAIGHADALYGFKSGFDRESLALGLKSGGFWPNNIHKGLANHQSTVFLFDADTGKCRAIVGGNLLTALRTAAASAVSIKYLARQDAKVLGMIGAGHQSTYQLRAAVEQRPFEKVLAWNFHPEMLSRLEDVAKELELPFETVDLDRLGAEADVIISITSSFAPILKASQVRPGTHLACMGTDTKGKQEMDADLVAGATVFADEVAQAVTIGECQHAFEKGLITRDDIIELGAVITGRHPGRSSPEEITLFDGTGVALQDLAVASAAVELALSRGTAIEVDF

SEQ ID NO: 340 - protein, 321 aa, Citreicella sp. SE45 genomic scaffold scf_1113211290443
MLIVPEREIADLMTREAAFSAVEQVFAAMAAGNAYNFPVVREAIGHEDALYGFKGGFDRAGLTLGLKAGGYWPHNLEKRGMINHQSTVFLFDPDTGKAKAMVGGNLLTALRTAAASSVSIRHLAREDAKVIGMVGAGHQATFQLRAALEQRDFDKVIGWNLHPEMLPNLEKVAAEAGLPFEAVELEGMRAADVIISITSSFDAILMEEHVAPGTHIACMGTDTKGKQEVAPALLAKATVFTDEVSQSVSIGEAQHAVAQGLIRETDISQLGAVINGAHPGRRSAEEITLFDGTGVGLQDLAVAAAVVDLAVEKGIAIEVDF

SEQ ID NO: 341 - protein, 321 aa, Citreicella sp. SE45 genomic scaffold scf_1113211290440
MLIVPEREIGALMTRASAFEAVEKVFAAMASGEAYNFPVIREAIGHEDALYGFKGGFDRAGLTLGLKAGGYWPNNLEKFKVINHQSTVFLFYPDTGKVAAMVGGNLLTALRTAAASSVSIAHLARRDAKVMGMVGAGHQATFQLRAALEQRPFEKVIGWNLHPEMLPNIETVADEAGLPFEAVPLEGMREADVIVSITSSFAPSLMAAHVSPGTHLACMGTDTRGKQEVEAALLAVATVFTDEVAQSVSIGEAQHAVAEGLISESDVHQIGAVINGSHPGRRSDEEITLFDGTGVGLQDLAVAAAVVDLAVEKGIAIEVDV

SEQ ID NO: 342 - protein, 321 aa, pCaer_C109
MYIVPEKAIADLVTREASFDAVEKVFAAMAAGDACNFPVVREAIGHEDALYGFKGGFDRAGLTLGLKAGGYWPNNLEKRGLINHQSTVFLFDPDTGKVKAMVGGNLLTALRTAAASSVSIKHLARQDAKVIGMIGAGHQAKFQLRAALEQREFEKVIGWNLHPEMLPNLQEVADEAGLPFEAVELDGMREADVIISITSSFDAILKADQVSPGTHIACMGTDTKGKQEVDPQLLVKADVFTDEVAQSISIGEAQHAVTQGLIQEADVAQIGAVINGTNPGRTSDDQITLFDGTGVGLQDLAVAASVVDVAVEKGVAIEVDF

SEQ ID NO: 343 - protein, 293 aa, Ensifer fredii USDA257
MAKRSAYNFPVIREAIGHADALYGFKSGFDRDSLALGLKSGGFWPNNVQNGLANHQSTVFLFDADTGRCRAVVGGNLVTALRTAAASAVSIKYLARKNAKVLGMIGAGHQSTYQLRAAVEQRPFEKVLAWNLHPEMLSRLEGVARELELPFETVDLDRLGDEADVIISITSSFAPILKASQVRPGTHLACMGTDTKGKQEMDAELIAAATVFTDEVAQAVTIGECQHAIEKGLISKDDIVEIGAVITGRHKGRSSPEEITMFDGTGVALQDLAVASAAVAHAVSRGTAIEVDF

SEQ ID NO: 344 - protein, 320 aa, Paracoccus pantotrophus J46 ICCP
MLVVAEKEIAGLMTPEAAFEAIEAVFASMARRKAYNFPVVREAIGHEDALYGFKGGFDAAALTLGLKAGGYWPNNQKHGLINHQSTVFLFDPDTGRVSAAVGGNLLTALRTAAASAVSIKHLAPKGAKVLGMIGAGHQSAFQMRAAANVHRFEKVIGWNPHPEMLSRLADTAAELGLPFEAVELDRLGAEADVIISITSSFSPLLLNEHVKGPTHIAAMGTDTKGKQELDPALVARARVFTDEVAQSVSIGECQHAIASGLIREDQIGELGAVVAGDDPGRGDAEVTIFDGTGVGLQDLAVAQKVLEIAKQEGLAQEVEI

SEQ ID NO: 345 - protein, 320 aa, Paracoccus sp. J4
MLVVAEKEIAGLMTPEAAFEAIEAVFASMARRKAYNFPVVREAIGHEDALYGFKGGFDASALTLGLKAGGYWPNNQKHNLINHQSTVFLFDPDTGRVSAAVGGNLLTALRTAAASAVSIKYLAPKGAKVLGMIGAGHQSAFQMRAAANVHRFEKVIGWNPHPEMLSRLADTAAELGLPFEAVELDRLGTEADVIISITSSFSPLLMDQHVKGPTHVAAMGTDTKGKQELDPALVARARVFTDEVAQSVSIGECQHAIASGLIREDQIGEIGAVVAGDNPGRGDAEVTIFDGTGVGLQDLAVAKAVVELAKHKGVAQEVEI

SEQ ID NO: 346 - protein, 327 aa, Solemya velum gill symbiont
MEAEKGVVVVSEATCEEVIDRASSFTAVESVFAAMARGDAYNFPVVREAIGHADALYGFKSGFDRAGMSLGVKSGGYWPGNVNLGIPNHQSTVFLFDPDTGRLKAMVGGNYLTAVRTAASSAVSINHLARKDAKVLGMVGAGHQSKFQLRAAADQRDFEKVVAWNPHPEMLPGLKAVADELGLPFESVEREELCAQADVIITITSAFEALLMKEWIKPGTHIACMGTDTKGKQEVDTALVESATLFTDEIVQSITIGENQHAIESGAISESDITPIGDVINGKHPGRSHADEITLFDGAGVGLQDLAVASVAVDLALEKDQAQHVSL

SEQ ID NO: 347 - protein, 320 aa, Paracoccus sp. N5
MFVVAEKEIAGLMTPEAAFEAIEAVFASMARRKAYNFPVVREAIGHEDALYGFKGGFDASALVLGLKAGGYWPNNQKHNLINHQSTVFLFDPDTGRVSAAIGGNLLTALRTAAASAVSIKYLAPKGAKVLGMIGAGHQSAFQMRAAAAVHGFEKVIGWNPHPEMLTRLADTAADLGLPFEAVELDRLGAEADVIISITSSFSPLLMDQHVKGPTHIAAMGTDTKGKQELDPALVARARVFTDEVAQSVTIGECQHAIAAGLIAEEAIGELGAVVSGDDPGRDGAEVTIFDGTGVGLQDLAVAQKVLEIAKEKGLAQEVEI

SEQ ID NO: 348 - protein, 334 aa, Roseovarius mucosus DSM 17069
MMNTQQQVAADGFVIVGEEICQKIISRADAFGAVEAVFAAMASGDAYNFPVVREAIGHADALYGFKGGFDRSGLSLGLKAGGYWPGNMDKGLTNHQSTVFLFDPDTGRLSALVGGNYLTAIRTAASSSVSIAHLARKDSKVLGMVGAGHQSTFQLRAAVEQRAFEKVVAWNPHPDMLPRLGAVAKELGLEFEAVTQEELGAQADVIITITSAFEPLMMADWIKPGTHIACMGTDTKGKQEVDPALFTRATVFADEIAQSITIGEAQHAVAKGLIAEGDITPIGAVINGTHGGRASEAEITLFDGTGVGLQDLAVASVAAKLAREQGLVTPITLG

SEQ ID NO: 349 - protein, 334 aa, Marinobacter sp. BSs20148
MDTSSEALTQPHQILIVSEDACQKVIGRHEAFQAVESVFSSMAKGSAYNFPVVREAIGHANALYGFKSGFDSEGLVLGVKAGGYWPGNVVQGRTNHQSIVALFDPDTGQLKALIGGNYLTAIRTAASSAVSIAHLARKNAKVLGMIGAGFQSTFQLHAALEQRDFEKVVAWNTHPEHLTRLADVCREHGLPFEAVSLQTLGAQSDVIITITSASEPLLQAAWIKPGTHLACMGTDTKGKQEVDQQLLARASVFTDEIAQSISIGEAQHAVAAKILFAEQITPIGEVINGSHQGRQSEQEITLFDGTGVGLQDLAVASAAASLAEVRGLAQRVTL

SEQ ID NO: 350 - protein, 321 aa, Ensifer sp. USDA 6670, CC2017
MIIVPENQIAELITPADCLVAVEGVFASMAKRSAYNFPVIREAIGHADALYGFKSGFDRESLALGLKSGGFWPNNVREGLANHQSTVFLFDADTGRCRAIVGGNLLTALRTAAASAVSIKYLARKDAKVLGMIGAGHQSTYQLRAAVEQRPFEKVLAWNLHPEMLSRLEGVARELELPFETVDLDRLGAEADVIISITSSFAPILEASQVRPGTHLACMGTDTKGKQEMDAELLAAATVFTDEVAQAVTIGECQHAIEKGLISRDNIVEIGAVITGCHTGRSSPEEITLFDGTGVGLQDLAVASAAVELALSKGTAIEVDF

SEQ ID NO: 351 - protein, 321 aa, Rhizobium etli CNPAF512
MIIVPESAIGELISLEDCVDAVEKVFVSMAERSAHNFPVVREAIGYADALFGFKSGFDREGLALGLKAGGFWPNNADKGLTNHQSTVFLFDPETGRCRAVVGGNLLTALRTAAASAVSIKHLARRDAKVLGMVGAGHQASFQLRAAVQQRQFEKVVAWNYHPEMLPKLAAVAEELAVPFEAVDLDRLGDEADVIITITSSFQPILKASQIRPGTHLACMGTDTKGKQEVDPALVAAATLFTDEIAQAISIGECQHAVAQGMIAPIDIAEIGAVINGQKSGRTSLEEVTLFDGTGVGLQDLAVAQAAVELALARGIAVEVDF

SEQ ID NO: 352 - protein, 321 aa, Sulfitobacter sp. 20_GPM-1509m
MLIVPEREIANLMTRAAAFDAVEQVFAAMAAGDAYNFPVVREAIGHEDALYGFKGGFDRAGLTLGLKAGGYWPNNLEKRDLINHQSTVFLFDPDTGKARAMVGGNLLTALRTAAASSVSIKHLARKDARVIGMVGAGHQATFQLRAALEQRDFDKVIGWNYHPEMLPNIEKIAREAGVPFQAVDLPGMVEADVIISITSAFSPSLMADHVAPGCHLACMGTDTKGKQEVEAALLARATVFTDEVAQSVSIGEAQHAVAEGLIAESDVHQLGAVINGTHAGRVSDDQITLFDGTGVGLQDLAVAAAVVDLAVAQGIAIEVDF

SEQ ID NO: 353 - protein, 321 aa, Maribius sp. MOLA 401
MLIVPEREIPDLLTRGASFDAVEKVFAAMAAGDAYNFPVVREAIDHEDALYGFKGGFDAKGQVLGLKAGGFWPNNMERRQIINHQSTVFLFDPDTGRVAAMVGGNYLTALRTAAASSVSIRHLARGDAKVLGMIGAGHQASFQLRAALEQREFERVIAWNYHPEMLPNLAKICDEVGVPFQAVELDGMREADVIVSITSAFAPSLMADHVAPGTHVACMGTDTKGKQEVEAQLLARATVFADEVAQSVSIGEAQHAIAEGLIDKAGIHQIGAVINGTHPGRRSDGEITLFDGTGVGLQDLAVAAAIVDLAKAKGVAIEVEF

SEQ ID NO: 354 - protein, 342 aa, Amphritea atlantica DSM 18887
MGGSIEERSFEELSPVDAGAGISLVSEAVCEQVVGRPEAFTAVESVFAAMASGAAYNFPVVREAIGHADALYGFKSGFDRAGMVLGVKSGGYWPGNVDKNLTNHQSTVILFDPDTGQLRSLVGGNYLTAVRTAAASAVSIAHLARKDARVLGMVGAGHQSTFQLRAALEQRNFEKVVAWNPHPEYLSRLAAVCEELGMPFAAVEREQLGAEADVIITITSAFEPLLMKQWIKPGTHIACMGTDTKGKQEVDPELLASASVFTDEVAQSISIGEAQHAVASGLLNEADITPIGEVINGTHPGRRDDLEITLFDGTGVGLQDLAVASAAVELAQAKGLAGQVSL

SEQ ID NO: 355 - protein, 320 aa, Rhodobacteraceae sp. HL-91
MWIVPESAIGGLVDDQSAFDAVEATFAAMARDDAYNFPVVREALGEGRQYGFKSGLDRAGAQLGVKAGGYFPGNAAKGIINHQSTVFLFDPDTGILQAAVGGNLLTALRTAAASAISIAHLSRADSTVLGMVGAGHQSVFQMRAALRQRKFERVVAWNYHPDMMDRLASAVAEEGLPFEEVSLEELGAQADVIITITSSPAASLMDAHVRPGTHIACMGTDTIGKQEVDPALLARAAVFTDEVAQSVTIGEAQHAIAQGLIKPEDITPIGAVINGAHKGRTSAEEITLFDGTGVGLQDIAVASKAVDLARANGSAIEVAL

SEQ ID NO: 356 - protein, 321 aa, Methylobacterium sp. UNCCL143
MIIVPEHAIDGLLTEAECFTAVEQVFASMARRRAGNFPVVREAIGHADALYGFKSGFDRDSLALGLKAGGFWPGNAAKGLTNHQSTVFLFDADTGRCRAVVGGNLLTALRTAAACAISVRHLARKDARVLGMIGAGHQSAFQLRAALAQRPFERVLAWNLHPGMFGRMEAVAREHGVPFEAVDLDRLGSEADVVVTITSSFAPILKAVQVRPGTHLACMGTDTRGKQEVEAELLAAATVFTDEVAQSVSIGEAQHAVARGLLAADSIVEIGAVINGDHPGRVSESEITLFDGTGVGLQDLAVAAVAVDRAVAKGLATEVEV

SEQ ID NO: 357 - protein, 321 aa, Aquisalimonas asiatica CGMCC 1.6291
MQIVSEKAVKAAVSRADAFTAVESVFAAMATGQAWNFPVVREAIGHADALYGFKSGFDRDHMALGVKSGGYWPGNAARGLTNHQSTVLLFDPDTGQPRALVGGNYLTAVRTAAASAVSIQHLARPDAKTLGIVGAGHQAPFQLRAAVEQRPIERVVAWNRSPERLESLREAAQAMGLPFEAVDRDTLCEQADVIITITSCFEPLLTREQIRPGTHIACMGTDTAGKQEIDPAILASAEVFTDDPTQAATIGECQHAVAQGHIHRDAIRPVGGVIGEPGSFRRSAEAITVFDGTGVGLQDLAVARVALERAVEAGTAVRIDL

SEQ ID NO: 358 - protein, 330 aa, Thalassotalea sp. ND16A
MSDQHNNQGVVVVTEEVCQAIMGRSDAFTAVENVFAAMSKNTAYNFPVIREAIGHADALYGFKSGFDRDSMVLGLKSGGYWPGNVEKGLTNHQSTVILFDPDTGKLKSLVGGNYLTAVRTAASSAVSIAHLARQDSKVLGMIGAGHQSTFQLRAAVEQRNFEKVVGWNIDPERLSILAEVCAELSLPFESVSREELCALSDVIITITSAFEALLDNAWIKPGTHIACMGTDTKGKQEVDAKLFRTATVFTDELAQSITIGEAQHAIQSGLIVESDIVPIGEVINGTNSGRTSEDEITLFDGTGVGLQDLAVASVAAELAQAKGQAFYINL

SEQ ID NO: 359 - protein, 329 aa, Roseovarius lutimaris DSM 28463
MSANTDDGLLIVSEEICEQVIRRPDAFSAVEAVFGAMARGDAYNFPVVREAIGHADALYGFKSGFDRAGMVLGVKAGGYWPGNMAKGLTNHQSTVCLFDPDTGRLVALVGGNYLTALRTAASSAVSIAHLARKDAKVLGMVGAGHQSTFQLRAAVEQRDFERVVAWNPHPDMLPRLAAVAEELGLAFEAVTPEGLGAQADVIITITSAFEPLIMADWIKPGTHIACMGTDTKGKQEVDPALFKSATVFADEIAQSITIGEAQHAVASGLIGEGDLTAIGEVINATHPGRSSDDEITLFDGTGVGLQDLAVASVAARLAREQGLVTPVAL

SEQ ID NO: 360 - protein, 322 aa, Halocynthiibacter sp. PAMC 20958
MIIVPEREIADLMTREVAFNAVEGVFAAMAAQDAYNFPVVREAIGYEDALYGFKGGFDKAGMTLGLKAGGYWPHNLDKHQLINHQSTIFLFDPDTGRVTAMVGGNLLTALRTAAASSVSIKHLARKDSKVIGMIGAGHQATFQLRAALEQREFEKVIGWNYHPEMLPNLEKVANEAGLPFEAVELDQLGHDADVIISITSAFAPSLLAKHVSAGTHIACMGTDTKGKQEVESALLARATVFTDEVAQSISIGEAQHAVAEGLIKESDVNQIGAVINGTHPGRVAADEITLFDGTGVGLQDLAVAASVVALAVKKGVAIDVDF

SEQ ID NO: 361 - protein, 321 aa, Leisingera sp. ANG-S3; identical to SEQ ID NO: 323

SEQ ID NO: 362 - protein, 320 aa, Paracoccus saliphilus DSM 18447
MWVVPEKEIAGLMTPEAAFDAVEAVFAAMASGEANNFPVVREAIGHEDALYGFKGGFDKSALNLGLKAGGYWPNNQKRDLINHQSTVFLFDPDTGRVSAAVGGNLLTALRTAAASAVSIKHLAPEGAKVLGMIGAGHQSAFQMKAAARVGNFERVIGWNPHPEMLTRLADTAAELGLPFEAVELPRLGAEADVIISITSAFEPLLMDAHVKGRTHIAAMGTDTKGKQELDPALVARARLFTDEIAQSLSIGEFQHASAAGSISDGDVTAIGQVITGNHEGRGDAEITIFDGTGVGLQDLAVAGAVVDLARQQGKAVEVEI

SEQ ID NO: 363 - protein, 321 aa, Rhodovulum sulfidophilum DSM 1374
MFIVPEKEIAGLVSADQCFEAVEAVFAAMARGDAYNFPVIREAIGHAEALYGFKSGFDRAGAVLGLKSGGYWPGNAAKGLTNHQSTVVLFDPDSGRPAALVGGNLLTALRTAAASAVSIRYLARSDARVLGVLGAGHQSAFQLRAAVAQRRFEKIVGWNYHPEMLPRLAETAAELGLPFEAVSLEDFGAQADVIVTISSSFSAQLMDAHVRPGTHLACMGTDTTGKQEIDPAIFVRARVFADEIAQSVEIGEAQHAVAAGLIAAEDIVEIGAVINGTAPGRQSDDEITVFDGTGVGLQDLAVAARAVAAARARGVAVEVDL

SEQ ID NO: 364 - protein, 321 aa, Litoreibacter ascidiaceicola DSM 100566
MFIVPEREIADLMTRDAAFDAVESVFAAMASKDAYNFPVIREAIGHEDALYGFKGGFDKAGMTLGLKAGGYWPNNLEKHGHINHQSTIFLFNPDTGMVSAMVGGNLLTALRTAAASSVSIKHLARKDAKVMGMVGAGHQATFQLRAALEQRQFEKVIGWNYHPEMLPNIEKIAIEAGLPFEAVELDGMREADVVISITSTFAPTIMADHIAPGTHIACMGTDTKGKQEVEAALLARATVFTDEVAQSVSIGEAQHAVAQGLIKESDVHQLGAVINGTHKGRTSDDEITLFDGTGVGLQDLAVAASVVELAVAKGVAIEVDF

SEQ ID NO: 365 - protein, 329 aa, Roseovarius marisflavi DSM 29327
MSANTDDGLLIVSEEICEKVIRRPDAFSAVEAVFGAMARGDAYNFPVVREAIGHADALYGFKSGFDRAGMVLGVKAGGYWPGNMAKGLTNHQSTVCLFDPDTGRLTALVGGNYLTALRTAASSAVSIAHLARKDAKVLGMVGAGHQSTFQLRAAVEQRDFERVVAWNPHPDMLPRLAAVAEELGLAFEAVTPEELGAQADVIITITSAFEPLIMADWIKPGTHIACMGTDTKGKQEVDPALFKSATVFADEIAQSITIGEAQHAVASGLIGEGNLTAIGEVINGTHPGRSSAEEITLFDGTGVGLQDLAVASVAARLAREQGLVTPVAL

SEQ ID NO: 366 - protein, 321 aa, Rhodovulum sp. ES.010
MIIVPEKEIAGLVSAEDSFSAVEAVFAAMARGDAYNFPVIREAIGHADALYGFKSGFDRAGLVLGLKSGGYWPGNAEKGLTNHQSTVVLFDADTGQAHALVGGNLLTALRTAAASAVSIKHLARDDAKVLGMVGAGHQSAFQMRAAAAQRDFERVVGWNYHPEMLPRLAETAEELGLPFEAVSLEELGAQADVIVTITSSFEAQLKDTHVRPGTHLACMGTDTKGKQEVDPAILARARVFTDEVAQSITLGEAQHAVAAGLIGEGDITQIGAVIEGTAAGRQSAEEITLFDGTGVGLQDLAVAAKAVDLAQEKGAAIDVAF

SEQ ID NO: 367 - protein, 321 aa, Ruegeria sp. P4
MYIVPERAIADLMTRDAAFDAVEKVFAAMAAGDAYNFPVVREAIGHEDALYGFKGGFDRAGLSLGLKAGGYWPNNLEKRGLINHQSTVFLFDPDTGKVRAMVGGNLLTALRTAAASSVSIKHLAREDAKVIGMIGAGHQAKFQLRAALEQRDFDKVIGWNLHPEMLPNLEEVATEAGLPFEAVELDGLKEADVIISITSSFDAILQADQVSPGTHIACMGTDTKGKQEVDPQLLVRATVFTDEVAQSTSIGEAQHAVAQGLIAEADVAQLGAVINGAHPGRSSAEQITLFDGTGVGLQDLAVAASVVELAVKKGIAIEVDF

SEQ ID NO: 368 - protein, 321 aa, Jannaschia rubra CECT 5088
MIIVPEAVIADLITPEASFTAVERVFASMAARSAYNFPVIREAIGHADALYGFKSGFDRAALNLGLKSGGYWPGNAAKGLTNHQSTVFLFDADTGKCRAVVGGNLLTALRTAAAAAVSVAHLARPDAKVLGIVGAGHQAAFQLRAVAAQRPFEKIVAWNRSPEKLETLRGVADELGLGFESVSIEDLGGQADVIVTITSSHDAILHGAQVKPGTHVACMGTDTKGKREVDNDLIAAATLFTDEVAQSTTIGECQHAIVDLTIRPEDITELGAVINGDHKGRTSAEEITLFDGTGVGLQDLAVASAVVELAMSRGVATEVDF

SEQ ID NO: 369 - protein, 327 aa, Ruegeria atlantica CECT 4292
MTTQEGLLIVGEDLCEQLVGRQQAFDAVQSVFGAMANGGARNFPVVREALGYADALYGFKSGFDRDGQVLGVKSGGYWPGNAEQGLTNHQSTVFLFDPDTGRLSALVGGNYLTAVRTAASSAVSIAHLSRKDAKVLGMVGAGHQSAFQLRAAAEQRGFEKVVAWNPHPDMLPRLAAVAEEIGLEFEAVSQQELGAQSDVIITITSAFEPLLMKDWIKPGTHLACMGTDTKGKMEVDPALVASATVFTDEVAQSATIGEAQHAMGSGTLTETQITPIGAVINGDHPGRSSVDEITLFDGTGVGLQDLAVASVAARLADEAGLAQRATL

SEQ ID NO: 370 - protein, 321 aa, Rhizobium sp. N324
MIIVPERAIADLIGSAECFTAVEQVFAAMARKSAYNFPVVRESIGYADALYGFKSGFDRESLSLGLKSGGFWPKNAEKGLTNHQSTVFLFDADTGRCRAVVGGNLLTALRTAAASAISIKYLAREDAKILGIIGAGHQSTFQLRAAVQQRNFEKVVAWNYHPEMLTRLEDVAKEVGLPFEAVDLHRLGAEADVIISITSSFRPSLMASQVRPGTHLACMGTDTKGKQEVDAKLVAASSLFTDEVAQAITIGECQHAIAAGLIAAEDILEIGAVITGEEKGRRSADDITLFDGTGVGLQDLAVASAVVDLAVSKGVAIEVDF

SEQ ID NO: 371 - protein, 321 aa, Rhizobium sp. N941; identical to SEQ ID NO: 370

SEQ ID NO: 372 - protein, 321 aa, Sinorhizobium americanum CFNEI 73
MIIVPENQIAGLITPADCLVAVEGVFASMAKKSAYNFPVIREAIGHADALYGFKSGFDRDSLALGLKSGGFWPNNVEKGLANHQSTVFLFDADNGRCRAVVGGNLLTALRTAAASAVSIKYLARKDAKVLGMIGAGHQSTYQLRAAVEQRPFEKVLAWNLHPEMLSRLEEVARELELPFETVDLDRLGAEADVIISITSSFAPILKASQVRPGTHLACMGTDTKGKQEMDPELIAAATVFTDEVAQAVTIGECQHAIDKGLISKGDIVEIGAVITGRHKGRSSPEEITLFDGTGVGLQDLAVASAAVELALSKGTAIEVDF

SEQ ID NO: 373 - protein, 321 aa, Puniceibacterium sediminis DSM 29052
MLIVPESKIADLMTPEAAFDAVEATFAAMARKSAYNFPVIREAIGHADALYGFKSGFDRESLVLGLKSGGYWPGNAEKGLTNHQSTIFLFDADTGKCSAIVGGNLLTALRTAAASAVSIKHLARQDSEVLGMIGAGHQSVFQMQAAVKQRNFKKVIGWNYHPEMLSRLADCAAELGLPFEEVSLETLGRDADVIISITSSFAPTLLDAHVTPGTHIACMGTDTKGKQEVEATLLKRATVFTDEIAQSISIGEAQHAVAAGLIAQSDITEIGAVINGTHPGRSSADEITLFDGTGVGLQDLAVAAKVVELAQQKGVALDVDF

SEQ ID NO: 374 - protein, 321 aa, Hyphomicrobium sulfonivorans WDL6
MIIIPEREIAGLISAADCFVAVERVFASMARRSAYNFPVVRESIGHASALYGFKSGFDRENLSLGLKAGGFWPDNAEKGLTNHQSTVFLFDADTGRCRAIVGGNMLTALRTAAASAVSIKYLARADAKVLGMIGAGHQSTFQLEAALDQKLFEKVLGWNIEPNALSRLEAVALKRNIPFERVSLDRLGAEADVIITITSSFAPILKTVQVRPGTHLACMGTDTKGKQEVEASLVAAATVFTDEIGQSIAIGEAQHAINEGLMEADEIVEFGNVVCGNHRGRTSADEITLYDGTGVGLQDLAVASAVVELAITRGVATEMDL

SEQ ID NO: 375 - protein, 321 aa, Marivita geojedonensis DSM 29432
MYIVPEAMIADLVSREASFEAVEQVFAAMAAKDAYNFPVVREAIGHEDALYGFKGGFDRVGGALGLKAGGYWPHNLEKRGLINHQSTVFLFDPDTGKVRAMVGGNLLTALRTAAASSVSIKHLARADARVMGMVGAGHQATFQLRAALEQRPFEKVIGWNYHPEMLPNIEKVANEAGVPFEAVDLPGMAEADVIISITSAFAPSLMADHVSPGTHLACMGTDTKGKQEVESALLARAKVFTDEVAQSVSIGEAQHAVAAGLIAESDVTEIGAVINGTHPGRTSGDDITLFDGTGVGLQDLAVASKVVDLAIERGVAIEVDF

SEQ ID NO: 376 - protein, 332 aa, Marinobacterium mangrovicola DSM 27697
MTTPASGAGNPVSIVSEAVCQQIVGRPEAFKAVENVFAAMARGDAYNFPVVREAIGHADALYGFKSGFDRAGMALGVKSGGYWPGNVQKDLTNHQSTVILFDPDTGQLKSLVGGNYLTAVRTAAASAVSIAHLARRDAKVLGMVGAGHQSTFQLRAALEQRDFEKVVAWNPHPEHLPRLAAVCEELRVPFEAVTQQELGAQADVIITITSAFEPLLLKEWIKPGTHIACMGTDTKGKQEVDPALLAAASVFTDEVAQSISIGEAQHAVASGLIAEADITPIGKVINGTHVGRRDDQEITLFDGTGVGLQDLAVASAAAELAEQQGLSQKIIL

SEQ ID NO: 377 - protein, 321 aa, Stappia aggregata IAM 12614
MIIVPEKEIAGLIGRQESFDAVESVFAAMASGAACNFPVIREAIGHADALYGFKSGFDRSSLALGLKSGGYWPGNMAKGLTNHQSTVFLFDADTGKAKAVVGGNLLTALRTAAASAVSIKHLARKDAKVLGMIGAGHQSAFQMRAAAEQRSFEKVLGWNLHPEMLVRLEATANELGLPYESVDLARLGAEADVIISITSSFDPILMEEHVTPGTHIACMGTDTKGKQEVDTALVAKAKLFTDEVAQSATIGECQHAVASGIVSEDNIIEIGAVINGNHPGRISQSDITLFDGTGVGLQDLAVASAAVDLAIQKGVAIEVDF

SEQ ID NO: 378 - protein, 331 aa, Sagittula stellata E-37
MKDTPQQGDGVLIVGEEACRALVGRAEAFAAVEAVFAAMASGEARNFPVVREAIGHADALYGFKSGFDRAGMALGVKAGGYWPGNAGRGLTNHQSTVCLFDPDTGRLSALVGGNYLTAVRTAASSAVSIAHLARRDAKVLGMVGAGHQSAFQLRAAAEQRAFEKVVAWNPHPEMLPQLAEVAASLGLPFEAVTPEELGAQADVVITITSAFEPLLMRDWIRPGTHVACMGTDTKGKMEVDAALLAAATVFTDEVAQSVSLGEAQHAVAGGLLSEGDITPIGAVINGTHPGRTSDDEITLFDGTGVGLQDLAVASVAARLAEAQGVAARVVL

SEQ ID NO: 379 - protein, 321 aa, Roseobacter sp. CCS2
MIIVPEKEMAGLLNRADAFTAVENVFASMSKGDAYNFPVIREAISHEDALYGFKGGFDKAGMALGLKAGGYWPNNLEKHGHINHQSTVFLFDPDTGMVKAMVGGNLLTALRTAAASSVSIKHLARKDARVMGMVGAGHQATFQLRAALEQREFEKVIGWNYHPEMLPNIEKVADEAGVPFEAVPLEGMVEADVVISITSTFAPTIMADHISPGTHIACMGTDTKGKQEIEAALLAQTTVFTDEVAQSISIGEAQHAIAEGMIQQSDVNELGAVINGTHPGRTSDDEITLFDGTGVGLQDLAVAASIVDVAVEKGIATIVEF

SEQ ID NO: 380 - protein, 338 aa, Roseobacter sp. AzwK-3b
MNDLSAQAPKAAQAGNTVTIVPEAEIAGLMTPEAAFDAVEATFAAMARGDAYNFPVIREAIGHADALYGFKSGFDRESLALGLKSGGYWPGNEARGLTNHQSTVILFDADTGRPSALVGGNLLTALRTAAASAVSIRYLARQDAKVLGMIGAGHQSAFQMRAAVQQRSFEKVVGWNYHPEMLSRLADTAAELGLSFEAVSLEELGAQADVIVTITSSFAPSLLDAHVRPGTHLACMGTDTNGKQEVEAGLLARARVFTDEVAQSVTLGEAQHAVAEGLISADDITQLGAVINGIHPGRSSDQEITLFDGTGVGLQDLAVAAAVVRLAREQGVASEVVL

SEQ ID NO: 381 - protein, 321 aa, Rhodobacteraceae bacterium KLH11 scf_1108856220443 genomic scaffold
MIIVPEKEIGALLGRKESYEAVEQVFAAMASGDAYNFPVVREAIGHEDALYGFKGGFDKAGQVLGLKAGGYWPHNLEKRGLINHQSTVFLFDPDTGMPTAMVGGNLLTALRTAAASSVSINHLARKDARVIGMVGAGHQATFQLRAALEQREFEKVIGWNLHPEMLPNIEKVAAEAGLPFEAVELPGMTQADVIVTITSSFAPTLLSDHVADGTHVACMGTDTIGKQEVGTDLITRASVFTDEVAQAITLGESQHAVKAGTKAEADIHQIGAVINGTHTGRSSDDEVTLFDGTGVGLQDLAVASAVVDLAIKQGIAIKVDI

SEQ ID NO: 382 - protein, 321 aa, Rhodobacteraceae bacterium KLH11 scf_1108856220445 genomic scaffold; identical to SEQ ID NO: 381

SEQ ID NO: 383 - protein, 321 aa, Silicibacter sp. TrichCH4B genomic scaffold scf_1113354613205
MYIVPERAIADLMTRDAAFDAVEKVFAAMAAGDAYNFPVVREAIGHEDALYGFKGGFDRAGLSLGLKAGGYWPNNLEKRGLINHQSTVFLFDPDTGKVRAMVGGNLLTALRTAAASSVSIKHLAREDAKVIGMIGAGHQAKFQLRAALEQRDFDKVIGWNLHPEMLSNLEEVATEAGLPFEAVELDGLKEADVIISITSSFDAILKADQVSPGTHIACMGTDTKGKQEVDPQLLVRATVFTDEVAQSISIGEAQHAVAQGLIAEADVAQLGAVINGAHPGRSSAEQITLFDGTGVGLQDLAVAASVVELAVKKGIAIEVDF

SEQ ID NO: 384 - protein, 321 aa, Pelagibaca bermudensis HTCC2601 1100011001308
MLIVHEREIAALMTRDAAFSAVEKVFAAMADAKAYNFPVVREAIGHEDALYGFKGGFDRAGLTLGLKAGGYWPHNLEKRGEINHQSTVFLFDPDTGKAKAMVGGNLLTALRTAAASSVSIRHLARDDAKVLGMIGAGHQATFQLRAALEQRAFEKVIGWNLHPEMLPNLEKVAQEAGVPFEAVELPGMTEADVIITITSAFSPSLMAEHVSPGTHIACMGTDTKGKQEVEAALLSRATVFTDEVAQSVSIGEAQHAVAEGALKAEDIAQLGAVINGSHPGRQSAEEITLFDGTGVGLQDLAVAAAVVDLAVEKGVATEVDF

SEQ ID NO: 385 - protein, 320 aa, Paracoccus sp. J39 ICCT; identical to SEQ ID NO: 345

SEQ ID NO: 386 - protein, 320 aa, Paracoccus sp. J55; identical to SEQ ID NO: 345

SEQ ID NO: 387 - protein, 327 aa, Rhodovibrio salinarum DSM 9154
MTDNHQVVVVPEDLCEALVSRADAFQAVEQVFAAMASGDARNFPVVREATGHAEALFGFKSGFDKAGMALGLKAGGFWPGNADKGLTNHQSTVFLFDPDTGRLQALVAGNYLTAVRTAASSSVSIRHLARPDAKVLGMVGAGHQAQFQLRAAAEQRAFEKVVAWNPHPDMLSKLEAVAREIGLPFEAVSQHELGAQAHVIITITSAFEPLLMRDWIKPGTHIACMGTDTKGKQEVDPELVAGARVFTDEVAQSVQLGETQHAVAQGLLAESDITPIGEVINKTHPGRQSDDEITLFDGTGVGLQDLAVAATAAKLAQQQGKAETVRL

SEQ ID NO: 388 - protein, 335 aa, Colwellia piezophila ATCC BAA-637
MSNSQQNNLPKNKGVSVVSEEVCQQVMGRENAFSAVENVFSAMAKNTAYNFPVIREAIGHEDALYGFKSGFDRDGMVLGLKSGGYWPGNMAKGLTNHQSTVILFDPDTGKLKSLVGGNYLTAVRTAASSAVSIAYLARKDSKVLGMIGAGHQSSFQLRAAVEQRDFEKVVCWNFHPEQIPNLAAVAEELGLPFESVTREELCAQADVIITITSAFEALIDKNWIKPGTHIACMGTDTKGKQEVDAKLLAVASVFTDELAQSITIGEAQHAIAQKLIQQSDIVPIGEVINGTKPGRTSDEQITLFDGTGVGLQDLAVASVAAELAEEKGLATYFQL

SEQ ID NO: 389 - protein, 321 aa, Rubellimicrobium mesophilum DSM 19309 (scaffold version)
MIVVPERIIAGLMTRADAFAAIEAVFAAMARGEARNFPVVREAIGHADALYGFKSGFDRAHLDLGLKSGGYWPGNAAKGLTNHQSTVVLFDADTGRCRALVGGNLLTALRTAAAAAVSVAHLARKDSRVLGIVGAGHQAAFQLRAVAEQRPFERVVAWNRSPEKLKGLACAAEEMGLPFESVSLDRLGAEADVIVTITSSFDAILGDAQVRPGTHLACMGTDTRDKKEVDPTLVARASVFTDEVAQAVTIGECQHAVALGLKGEADIVPLGAVINGDHPGRASEEEVTLFDGTGVGLQDLAVASRVVDLAVQKGLATQVEF

SEQ ID NO: 390 - protein, 321 aa, Maritimibacter sp. HL-12
MLIVPERDIAKLLTRKAAFEAVEKVFASMAKGAARNFPVVREAIGHEDALFGFKGGFDRAGMTLGLKAGGYWPHNMAAHGVINHQSTVVLFDPDTGRLRAMVGGNLLTALRTAAASAVSIKHLARPDAAVLGMIGAGHQAAFQLRAALEQRDLVKVIGWNRNPEKLAGLEAVAAEAGVAFETVDLDGMGEADVIITITSSFAPILEHGHVSPGTHVACMGTDTRGKQEVDPGLLARASVFTDQVAQSVSIGEAQHAVGQGLISEAEIGELGAVINKTLPGRTTDDQITLFDGTGVGLQDLAVAASVVEMAVDQGLAIEVAL

SEQ ID NO: 391 - protein, 321 aa, Methylobacterium sp. L2-4; identical to SEQ ID NO: 338

SEQ ID NO: 392 - protein, 321 aa, Ensifer fredii GR64
MIIVPENQIAGLMTPADCLVAVEEVFASMAKRSAYNFPVIREAIGYADALYGFKSGFDRANLALGLKSGGFWPNNVQKGLANHQSSVFLFDADTGKCRAVVGGNLLTALRTAAASAISIKHLARKDAKVLGMIGAGHQSTFQLRAAVEQCSFEKILAWNFHPEMLSRLEEVARELELPFEAVELDRLGAESDVIISITSSFAPILKASQVRPGTHLACMGTDTKGKQEMEAGLVAAATVFTDEIAQAVTIGECQHAIERKLLSRADITELGAVITGRHPGRSSPDEITLFDGTGVGLQDLAVASAAVAHAVSRGTAIEVDF

SEQ ID NO: 393 - protein, 321 aa, Ponticoccus litoralis DSM 18986
MLIVPEREIADLMTREAAFAAVESVFAAMASGDAYNFPVVREAIGHEDALYGFKGGFDRAGLTLGLKAGGYWPHNLEKRKEINHQSTVFLFDPDTGKARAMVGGNLLTALRTAAASSVSIRHLAREEAKVLGMIGAGHQATFQLRAALEQRPFEKVVAWNLHPEMLPNLEKVAQEADVPFEAVELPGMAQADVIITITSAFAPSLLAEHVSPGTHIACMGTDTKGKQEVEAALLTHATVFTDEVAQSVSIGEAQHAVADGTLKPGDIAQLGAVINGTHPGRQSAEEITLFDGTGVGLQDLAVAASVVDLAVEKGVAIEVDF

SEQ ID NO: 394 - protein, 321 aa, Rhizobium sp. OK494
MIIVPETEIAGLVTPADCFRAVEGVFASMADKSAHNFPVVREAIGHADALYGFKSGFDRKGLALGLKAGGFWPNNVHKGLTNHQSTVFLFDPDTGKCRAVVGGNLLTALRTAAASAISIKYLARKDAKVLGMIGAGHQATFQLRAALAQRPFERIVGWNLHPDMLSRLEEVAKEEGLPFEAVDLDRLGAEADVIISITSSFAPMLKASQVRAGTHLACMGTDTKGKQEVEAEILAAAAVFTDEVAQAVTIGESQHAIERGLIREEAIVEIGAVINGTHPGRTSADQITLFDGTGVGLQDLAVASAAVELALAKGVAIEVDF

SEQ ID NO: 395 - protein, 321 aa, Planktotalea frisia DSM 23709
MWIVPEREIADLLTRDASFDAVEKVFAAMAAGDAYNFPVIREAIGHEDALYGFKGGFDGVGGTLGLKAGGYWPHNLEKRNLINHQSTVFLFDPDTGKVAAMVGGNYLTALRTAAASSVSIKHLARTDAKVMGMVGAGHQATFQLRAALEQREFEKVIGWNYHPEMLPNIEKVANEAGVPFEAVELEGLGEADVVISITSTFAPTIMADHISAGTHIACMGTDTKGKQEVEAALLARATVFTDEVAQSISIGEAQHAIEAGLIQEADVHQIGAVINATHKGRTSDDEITLFDGTGVGLQDLAVSAAIVRMAIEQGVAIEVDF

SEQ ID NO: 396 - protein, 320 aa, Paracoccus denitrificans DSM 415; identical to SEQ ID NO: 303

SEQ ID NO: 397 - protein, 320 aa, Paracoccus halophilus CGMCC 1.6117
MWVVPEKEIAGLMTPEAAFDAIESVFASMARRKAYNFPVVREAIGYEDALYGFKGGFDAAALTLGLKAGGYWPNNQKHGIINHQSTVFLFDPDTGRVAAAVGGNLLTALRTAAASAVSIKHLAPKGASVLGMIGAGHQSVFQMKAAARVNKFERVLGWNPHPEMLGRLADTAAELGLPFEAVELDRLGAEADVIIAITSSFAPLLMDGHVKGPTHIAAMGTDTKGKQELDPALVARARLFTDEIAQSVSIGEYQHVIAGNLVQQDAIGELGAVVTGDNPGREGDEVTIFDGTGVGLQDLAVAAAVVELAKQKGVAQRVEI

SEQ ID NO: 398 - protein, 331 aa, Roseovarius tolerans DSM 11457
MMDQKVETQGIVIVGEEICQEVISRADAFSAVEAVFGAMAKGDAYNFPVVREAIGHADALYGFKGGFDKSGLTLGLKAGGYWPGNMEKGLTNHQSTVCLFDPDTGQLSALVGGNYLTALRTAASSSVSIAHLARKDSRVLGMVGAGHQSAFQLRAAAEQRDFDKVVAWNPHPDMLPRLQAVAEELGLAFEGVSQEELGAQADVIITITSAFEPLLMADWIKPGTHIACMGTDTKGKQEVDPVLFQRATVFADEIAQSISIGEAQHAVAQGLIAEGDITPVGAVINGTHAGRASAEEITLFDGTGVGLQDLAVASVAARIARERGLVTPVTL

SEQ ID NO: 399 - protein, 321 aa, Jannaschia pohangensis DSM 19073
MIIVPESAIANLMTADDAFKAVEAVFAAMSRGDAYNFPVIREAIGHADALYGFKSGFDRAGLNLGLKSGGYWPGNADKGLTNHQSTVFLFDADTGKCRAVVGGNLLTALRTAAAAAVSTAHLAREDARVLGIVGAGHQSTFQLRQVAATRDFERVVAWNRSPEKLDRLAKVAAELGLPFEAVSLETLGAQADVIVTIVSAQAPTLLDAHVRPGTHIACMGTDTKGKQEVEAAILARATVFTDEVAQSVTIGEAQHAVGQGLIAKGDVNELGAVINGTHPGRRSGDEITVFDGTGVGLQDLAVAASVVERAIAEGVAVEVDF

SEQ ID NO: 400 - protein, 329 aa, Ruegeria sp. 6PALISEP08
MKDMPDKPLLIVGEDLCQQLVGRAEAFDAVQNVFAAMARGDAYNFPVIREAIGYADALYGFKSGFDRAGQVLGVKSGGYWPGNMDKGLTNHQSTVFLFDPDTGRLSALVGGNYLTAVRTAASSAVSIAHLARKDAKVLGMVGAGHQSTFQLRAAAEQRDFEKVVAWNPHPEMLPRLGEVAAEIGLEFEAVTQEELGAQADVIITITSAFEPLLMKDWIKPGTHLACMGTDTKGKQEVDAALVSHATVFTDEVAQSISIGEAQHAIADGTLTKVRITSIGSVINNDHPGRTSDDEITLFDGTGVGLQDLAVASVAARLADQSGKAERATL

SEQ ID NO: 401 - protein, 321 aa, Mesorhizobium sp. F7
MIVVSERAVAELITQADCLTAVEKVFASMARGSAYNFPVIREAIGHADALYGFKSGFDRESLALGLKSGGFWPGNSQKGLTNHQSTVFLFDADTGRCKAMVGGNLLTALRTAAASAVSIRHLARRDCRVLGMIGAGHQAAFQLRAALDQRCFERIVAWNFHPEMLGRLAEVAGERGIPFEEVSLDRLGAESDVIVTITSSFSPLLKAMQVRPGTHLACMGTDTKGKQEVEAELLAAATVFTDEVAQAVSIGESQHAIGRGLIRESDIIEIGAVITNAHPGRTSDDEITLFDGTGVGLQDLAVASAAVDLAIAKGAAVEVDF

SEQ ID NO: 402 - protein, 334 aa, Neptunomonas antarctica S3-22; identical to SEQ ID NO: 324

SEQ ID NO: 403 - protein, 321 aa, Oceanicola nitratireducens CGMCC 1.7292
MLIVPEREVAGLMTREAAFTAVEQVFAAMANGNAYNFPVVREAIGHEDALYGFKGGFDRTGLALGLKAGGYWPNNLEKRGMINHQSTVFLFDPDTGKARAMVGGNLLTALRTAAASSVSIRHLAREECKVIGMVGAGHQATFQLRAALEQRAFEKVIGWNMHPEMLPNIEKVAAEAGLPFEAVELDGLRAADVIISITSSFDAILTADHVAPGTHIACMGTDTKGKQEVSPELLSKATVFTDEVAQSVSIGEAQHAVALGLIREADISQLGAVIDGTHPGRQSDEEITLFDGTGVGLQDLAVAAAVVDLAVEKGIAIEVDF

SEQ ID NO: 404 - protein, 321 aa, Sinorhizobium fredii CCBAU 25509
MIIVPENQIAGLMTPADCLVAVEEVFASMAKRSAYNFPVIREAIGYADALYGFKSGFDRSNLALGLKSGGFWPNNVQIGLANHQSSVFLFDADTGKCRAVVGGNLLTALRTAAASAISIKHLARKDAKVLGMIGAGHQSAFQLRAAVEQRSFEKILAWNLHPEMLSRLAEVAMELKLPFKIVDLERLGAESDVIISITSSFAPILKASQVRPGTHLACMGTDTKGKQEMEAELVAAATVFTDEVAQAVTIGECQHAIEKKLLSRDDITELGAVITGRHPGRSSPDEITLFDGTGVALQDLAVASAAVAHAVSRGTAIEVDF

SEQ ID NO: 405 - protein, 321 aa, Leisingera sp. ANG-M6
MYIVPEKAIADLVTREASFDAVEKVFAAMAAGDAYNFPVVREAIGHEDALYGFKGGFDRAGLTLGLKAGGYWPNNLEKRGLINHQSTVFLFDPDTGKVKAMVGGNLLTALRTAAASSVSIKHLARQDAKVIGMIGAGHQATFQLRAALEQRQFEKVIGWNYHPEMLPNIEKVAAEAGLPFEAVDLPGMTEADVIISITSAFAPSLMADHVSPGTHVACMGTDTKGKQEVEAELLVKASVFTDEVAQSITIGEAQHAVAQGLIQESDVAQIGAVINGTNPGRTSDDQITLFDGTGVGLQDLAVAASVVEVAVEKGIAIEVDF

SEQ ID NO: 406 - protein, 321 aa, Leisingera sp. ANG-M7
MYIVPEKAIADLVTREASFDAVEKVFAAMASGDAYNFPVVREAIGHEDALYGFKGGFDRAGLTLGLKAGGYWPNNLEKRGLINHQSTVFLFDPDTGKVKAMVGGNLLTALRTAAASSVSIKHLARQDAKVIGMIGAGHQATFQLRAALEQRQFEKVIGWNYHPEMLPNIEKVAAEAGVPFEAVELEGMREADVIISITSAFAPSLMADHVSPGTHIACMGTDTKGKQEVEAELLVKSSVFTDEVAQSISIGEAQHAVAQGLIQESDVAQIGAVINGTNPGRTSDDQITLFDGTGVGLQDLAVAASVVEVAVEKGIAIEVDF

SEQ ID NO: 407 - protein, 321 aa, Loktanella maricola DSM 29128
MIVVPEKEIAGLLTRADAFDAVEKVFASMSKGSAYNFPVIREAIGYEDALYGFKGGFDNTGMALGLKAGGYWPNNLEKHGEINHQSTVFLFDPDTGKVKAMVGGNLLTALRTAAASSVSIKHLARKDAKVMGMVGAGHQATFQLRAALEQREFEKVIGWNYHPEMLPNIEKVADEAGVPFEAVELDGLVEADVVISITSTFAPTIMANHIAPGTHIACMGTDTKGKQEVEAALLAQTTVFTDEVAQSISIGEAQHAIAAGLIQQSDVNELGAVINGTHPGRTSDDEITLFDGTGVGLQDLAVASSIVDLAVEKGIATIVEF

SEQ ID NO: 408 - protein, 321 aa, Loktanella sediminum DSM 28715
MIIVPEREIAGLMTRKAAFDAVEKVFAAMSAGDAYNFPVVREAIGHEDALYGFKGGFDQAGLTLGLKAGGYWPNNLEKRNLINHQSTVFLFDPDTGKAKAMVGGNLLTALRTAAASSVSIKHLARKDAKVIGMVGAGHQATFQLRAALEQRDFEKVIGWNLHPEMLPNIEKVAEEAGLPFEAVDLSGMTEADVIISITSSFAPSLMADHVSSGTHIACMGTDTKGKKEVEAALLETATVFTDEVAQSISIGEAQHAIAEGLISQNDVNELGAVINGTHAGRIDEDQITLFDGTGVGLQDLAVAASVVDLAAAKGIAIEVDF

SEQ ID NO: 409 - protein, 321 aa, Tateyamaria sp. ANG-S1
MLIVPEKDIADLMTRQAAFDAVEQVFAAMAAEDAYNFPVVREAIGHEDALYGFKGGFDRAGATLGLKAGGYWPHNLEKRDLINHQSTVFLFDPDTGKPAAMVGGNLLTALRTAAASSVSIKHLARPDAKVLGMIGAGHQATFQLRAALEQRDFERVIGWNYHPDMLPNIAKVAEEAGLPFEAVDLPGMVDADVIISITSAFAPSLMADHVSPGTHIACMGTDTKGKQEVEAALFARATVFTDEVAQSVSIGEAQHAIAAELIEASDIHQIGAVINGAHPGRSGDTDITLFDGTGVGLQDLAVAARVVDLAEKKGIAIHVDF

SEQ ID NO: 410 - protein, 321 aa, Labrenzia alexandrii CECT 5112
MIIVPEKEIAALLGRAEAFEAVESVFAAMSSGVAYNFPVIREAIGHADALYGFKSGFDRSSLALGLKSGGYWPGNADNGLTNHQSTVFLFDADTGKARAVVGGNLLTALRTAAASAVSIKHLARKDAKVLGMIGAGHQSAFQMRAAVEQRSFEKVIGWNLHPEMLSRLEETAAELDLPFEAVDLDRLGAEADVIISITSSFDPILKVSQVTPGTHLACMGTDTKGKQEVEAELVAKATVFTDEVAQSSTIGECQNAVASGLISESDINEIGAVINGNHKGRTSVEEITLFDGTGVGLQDLAVASAVVDLAVEKGIAISVDF

SEQ ID NO: 411 - protein, 338 aa, Roseovarius litoreus DSM 28249
MNDLSAQAPKAAQAGNTVTIVPEAEIAGLMTPEAAFDAVEATFAAMARGDAYNFPVIREAIGHADALYGFKSGFDRESLALGLKSGGYWPGNEARGLTNHQSTVILFDADTGRPSALVGGNLLTALRTAAASAVSIRYLARQDAKVLGMIGAGHQSAFQMRAAVQQRSFEKVVGWNYHPEMLSRLADTAAELGLPFEAVTLEELGAQADVIVTITSSFAPSLLDAHVRPGTHLACMGTDTKGKQEVEAGLLARARVFTDEVAQSVTLGEAQHAVAEGLTSADDITQLGAVINGTHPGRTSDQEITMFDGTGVGLQDLAVAAAVVRLAREQGVASQVVL

SEQ ID NO: 412 - protein, 321 aa, Labrenzia sp. CP4
MIIVPEKEIAGLIGRQESFDAVESVFAAMAGGAAYNFPVIREAIGHADALYGFKSGFDRSSLALGLKSGGYWPGNMAKGLTNHQSTVFLFDADTGKAKAVVGGNLLTALRTAAASAVSIKHLARKDAKVLGMIGAGHQSAFQMRAAVEQRDFEKVLGWNLHPEMLVRLEETANELGLPYESVDLARLGTEADVIISITSSFDPILMEEHVSPGTHIACMGTDTKGKQEVDVALVAKAKLFTDEVAQSATIGECQHAVASGIVSEDNIIEIGAVINGNHPGRTSQSDITLFDGTGVGLQDLAVASAAVDLAIQKGVAIEVDF

SEQ ID NO: 413 - protein, 321 aa, Rhizobium sp. N541; identical to SEQ ID NO: 370

SEQ ID NO: 414 - protein, 320 aa, Paracoccus sp. MKU1
MLVVAEKEIAGLMTPEAAFEAIEAVFASMARRKAYNFPVVREAIGHEDALYGFKGGFDASALTLGLKAGGYWPLNQKHNLINHQSTVFLFDPDTGRVSAAVGGNLLTALRTAAASAVSIKYLAPKGAKVLGMIGAGHQSAFQMRAAANVHRFEKVIGWNPHPEMLGRLADTAAELGLPFEAVDLPRLGAEADVIISITSSFSPLLMNEHVKGPTHIAAMGTDTKGKQELDPALVARARIFTDEVAQSVSIGECQHAIASKLIAEEQIGELGAVVAGDNPGRGDAEVTLFDGTGVGLQDLAVAKAVVELAKHKGVAQEVEI

SEQ ID NO: 415 - protein, 321 aa, Pseudoruegeria marinistellae SF-16
MLIVPEREIANLMTREAAFEAVQKVFAAMASGDAYNFPVVREAIGHEDALYGFKGGFDRAGLTLGLKAGGYWPNNLEKHGMINHQSTVFLFDPDTGRATAMVGGNLLTALRTAAASSVSIAHLAREDARVIGMIGAGHQAKFQLRAALEQRSFEKVIGWNLHPEMLPNLEEVASEAGLPFEAVELDGIRDADVIISITSSFDAILTADQVSPGTHIACMGTDTKGKQEVDPALLARATVFTDEVAQSISIGEAQHAIASGLIAENDIAQLGSVINGTHPGRTSAEQITLFDGTGVGLQDLAVAAAVVDLAARNGSAIEVDF

SEQ ID NO: 416 - protein, 321 aa, Ruegeria conchae DSM 29317
MIIVPEKEIGALLGRNESYEAIEQVFAAMAAGDAYNFPVVREAIGHADALYGFKGGFDRAGMTLGLKAGGYWPNNLETHGLINHQSTVFLFDPDTGRVKAIVGGNLLTALRTAAASSVSINHLARKDAKVIGMVGAGHQAKFQLRAALEQREFEKVIGWNLHPDMLPNIEEVASEAGLPFEAVELPGMVEADVIITITSSFAPTLMSDHVSDGTHVACMGTDTVGKQEVGVDLINRATVFTDEVAQSITLGECQHAVASGSKTETDIRQIGEVINGTHPGRQSDQEVTLFDGTGVGLQDLAVASAVVELAVEQGIAIEVDF

SEQ ID NO: 417 - protein, 321 aa, Labrenzia sp. C1B10
MIIVPEKEIAGLIGRQESFDAVESVFAAMAGGAAYNFPVIREAIGHADALYGFKSGFDRSSLALGLKSGGYWPGNMAKGLTNHQSTVFLFDADTGKAKAVVGGNLLTALRTAAASAVSIKHLARKDAKVLGMIGAGHQSAFQMRAAAEQRDFEKVLGWNLHPEMLVRLEETANELGLPYESVDLARLGAEADVIISITSSFDPILMEEHVSPGTHIACMGTDTKGKQEVDVALVAKAKLFTDEVAQSATIGECQHAVASGIVSEDNIIEIGAVINGNHPGRTSQSDITLFDGTGVGLQDLAVASAAVDLAIQKGVAIEVDF

SEQ ID NO: 418 - protein, 321 aa, Methylobacterium radiotolerans NDB3P7
MIIVPEHAIDGLLTEAECFGAVEQVFASMARRRAGNFPVVREAIGHADALYGFKSGFDRDSLALGLKAGGFWPGNAAKGLTNHQSTVFLFDADTGRCRAVVGGNLLTALRTAAACAISIRHLAREGARVLGMIGAGHQSAFQLRAALAQRPFERVLAWNLHPGMFGRMEAVARERGVPFEVVDLDRLGAEADVVVTITSSFAPILKAAQVRPGTHVACMGTDTRGKQEVEAELLAAATVFTDEVAQSVSLGEAQHAVARGLLAADSIVEIGAVINGDHPGRVSDAEITVFDGTGVGLQDLAVAAVAVDRALAKGLATEVGF

SEQ ID NO: 419 - protein, 345 aa, Colwellia psychrerythraea 34H
MSDSKENHAPENHSHKNSLPVNKGVSVVSEAVCQEVMGRADAFTAVENVFSAMAKNTAYNFPVIREAIGHADALYGFKSGFDRDGMVLGLKSGGYWPGNVQKDLTNHQSTVILFDPDTGQLKSLVGGNYLTAVRTAASSAVSIAHLARKDSKVLGMVGAGHQSTFQLRAAVEQREFEKIVCWNFHPEQIPKLAAVAEELGLPFESVTREELCAQADVIITITSAFEALIDKDWIKPGTHIACMGTDTVGKQEVDAKLLAVAKVFTDELAQSITLGEAQHAIAQKLIQQSDIVPIGEVINGTKTGRTSAEDITLFDGTGVGLQDLAVASVAAELAEAKGQVTYFNL

SEQ ID NO: 420 - protein, 333 aa, Psychrobacter arcticus 273-4
MSEANSVNSNEGLLIVSEDACKSVIDRPSAFIAVENVFASMSRGDAYNFPVIREAIGYADALYGFKSGFDRAGKSLGLKSGGYWPGNAAKGLTNHQSTIFLFNPDNGKLRALVGGNYLTAVRTAAASAVSIAHLARKDSKVLGMVGAGHQSTFQLRAALEQRSFEKVVAWNKNKDRLKNLQAVAEELGVPFEAVEREQLCSEADVIITITSAFEPLLMKEWIKPGTHIACMGTDTVGKQEVDVNLVASATVFTDEIAQSISLGEAQHAIKSGAIKESDITTLGDVINGDHPGRSSDDEITLFDGTGVGLQDLAVASAAAKLALEKGEAQHISL

SEQ ID NO: 421 - protein, 334 aa, Roseovarius sp. 217
MMNTQNEVSADGFVIVGEEICQKIISRADAFGAVEAVFAAMARGDAYNFPVVREAIGHADALYGFKGGFDRSGLSLGLKAGGYWPGNMDKGLTNHQSTVFLFDPDTGRLSALVGGNYLTALRTAASSSVSIAHLARNDSKVLGMVGAGHQSTFQLRAAVEQRAFEKVVAWNPHPDMLPRLGAVAEELGLEFEAVTQEELGAQADVIITITSAFEPLMMADWVKPGTHIACMGTDTKGKQEVDPALFQRAAVFADEIAQSISIGEAQHAVGKGLIAEADITPIGAVINGTHTGRSNAEEITLFDGTGVGLQDLAVASVAAKLAREQGLVTPITLG

SEQ ID NO: 422 - protein, 334 aa, Marinobacter sp. ELB17
METPSEALIQPHQILIISEDTCQKVIGRPEAFQAVESVFSSMAKGSAHNFPVVREAIGHAGALYGFKSGFDREGLVLGVKAGGYWPSNVVKGLTNHQSTVALFDPNTGQLKALVGGNYLTAIRTAASSAVSIAHLARKNAKVLGMIGAGFQSTFQLRAAIEQRDFEKVVAWNTHPEHLTRLADVCREHDLPFEAVSLQALGAQSDVIITITSASEPLLQAGWIKPGTHLACMGTDTKGKQEIDHRLLAQATVFTDEIDQSISIGEAQHAVAARVLRAEQITPIGEVINGSHQGRQSEQEITLFDGTGVGLQDLAVASAAASIAEARGLVQRVTL

SEQ ID NO: 423 - protein, 321 aa, Rhizobium leguminosarum bv. trifolii WSM597
MIIVPESAIGELVSLGDCVDAVEKTFVSMAERSAHNFPVVREAVGYADALFGFKSGFDREGLALGLKAGGFWPNNSDKGLTNHQSTVFLFDPETGRCRAVVGGNLLTALRTAAASAISIKHLARRDAKVLGMVGAGHQASFQLRAAVQQRQFEKVVAWNYHPEMLPKLAAVAKELAVPFEAVDLERLGDEADVIITITSSFQPILKASQIRPGTHLACMGTDTKGKQEVDPALVAAATLFTDEIAQAISIGECQHAVAQGMIAPIDIAEIGAVINGQESGRTSPEEVTLFDGTGVGLQDLAVAQAAVELALARGIAVEVDF

SEQ ID NO: 424 - protein, 321 aa, pMeth_A285
MYIVPEQEIADLMTRKAAFDAVEKVFAAMAAGDAYNFPVVREAIGHEDALYGFKGGFDRAGLTLGLKAGGYWPNNLEKRGLINHQSTVFLFDPDTGKVKAMVGGNLLTALRTAAASSVSIKHLARKDAKVIGMIGAGHQAKFQLRAALEQREFEKVIGWNLHPEMLPNLQEVADEAGLPFEAVELEGLREADVIISVTSSFDAILKVDQVSPGTHIACMGTDTKGKQEVDPQLLVTADVFTDEIAQSVSIGEAQHAVAQGLIKEADVAQIGAVINGTNPGRTSDGQITLFDGTGVGLQDLAVAASVVERAVEAGIAIEVDF

SEQ ID NO: 425 - protein, 325 aa, Roseobacter litoralis Och 149
MSKGLLIVGEDMCAEVVSSADAFTAVEAVFGAMAKGDAYNFPVIREAIGYADALYGFKSGFDKAGKTLGVKSGGYWPGNMDKGLTNHQSTIFLFDPDTGMLEALVGGNYLTAVRTAASSSVSIAHLARKDAKVLGMVGAGHQSTFQLRAAAEQRSFEKVVAWNPHPDMLPRLGAVAEELGLEFEAVTQEELGAQADVIITITSAFEPLLMKDWIKPGTHIACMGTDTKGKQEVDPELLASATVFADEIAQSITIGEAQHAVASGHLSESDITPIGAVINGTHAGRSSDQEITLFDGTGVGLQDLAVASVAAREAESRGKATRIAL

SEQ ID NO: 426 - protein, 321 aa, Octadecabacter antarcticus 307
MYIVPESAIADILTRPDAFDAVEKVFAAMSAGDAYNFPVIREAIGHEEALYGFKGGFDGVGKSLGLKAGGYWPHNLEKRGIINHQSTVFLFDPDTGKVAAMVGGNLLTALRTAAASSVSIKHLARKDAKVMGMIGAGHQAKFQLRHALETHNFEKVIGWNYHPEMLPSLAEVAAEFDLPFEAASLKGMVEADVVISMTSSFNPIFGAAHISDGTHIACMGTDTVGKQECDTDLIVKATIFTDEVAQSVTLGETQHAVAAGLKSRDDIFELGAVINGTHAGRKSENEITLFDGTGVGLQDLAVSASIVEIAKAKGIGMEVDF

SEQ ID NO: 427 - protein, 321 aa, Methylopila sp. M107
MLIVPENKVAELINTAECFSAVENVFASMASKSANNFPVVREAIGHADALYGFKSGFDRETLALGVKSGGFWPGNAARGLVNHQSSIFLFDADTGRCRAVVGGNLITAIRTAAASAVSIKHLARKDAKTIGMIGAGHQSAFQLRAALEQRPFDRVLGWNVEPKMLQRLRDVADERGVAFEAVGLDRLGAEADVIITITSSFAPILKASHIRPGIHLACMGTDTRGKQEVEAELTASAILFTDEIVQAVTIGECQHAVAAGLVSQDEIAELGAVINGSDPGRRSDEEITLFDGTGVGLQDLAVATRVVDRAIETGAAIEVEY

SEQ ID NO: 428 - protein, 321 aa, Loktanella sp. SE62
MIIVPEAAIADLITRADAYRAVENVFASMSKGRAYNFPVIREAIGHADALYGFKSGFDRDGLALGMKSGGYWPRNADNGLTNHQSTVFLFDADTGKCRAVVGGNLLTALRTAAASAVSINHLARQDAKVLGMIGAGHQSAFQLRAAVEQRDFDRIVGWNYHPDMLPRLAKVAAEVGLPFEAVSLDELGAQADVIISITSAFAPSLMDADVRPGTHIACMGTDTKGKQELDPALLARATIFTDEIAQSVTIGEAQHAISAKLITESDISEIGAVINGTHPGRSDAEEITIFDGTGVGLQDLAVAAAVVDLAVAKGVATEVDF

SEQ ID NO: 429 - protein, 321 aa, Phaeobacter gallaeciensis ANG1 (ANG1); identical to SEQ ID NO: 323

SEQ ID NO: 430 - protein, 320 aa, Rhodobaca barguzinensis DSM 19920
MWIVPESAIPGLVDEQSAFDAIEATFAAMSRGDAYNFPVVREALGEGRQYGFKSGLDRVGALLGVKAGGYFPGNAERGIPNHQSTVYLFDPDSGKPTAMVGGNLLTALRTAAASAISIKHLARADSEVLGMVGAGHQSAFQMRAAVRARGFKKVIGWNYHPEMLSRLADTAAELGLPFEAVSLEQLGAEADVIITITSSFDAIVQDAHIRPGTHLACMGTDTKGKQEVEAAILARASVFTDEVAQSVSIGEAQHAVAAGLLSEGAITEIGAVINGAHAGRAGAEEITVFDGTGVGLQDLAVASRAVELAVERGLAQQIAF

SEQ ID NO: 431 - protein, 330 aa, Mameliella alba DSM 26384
MKDMPETQGLVIVGEAECERLVGRKDAFDAVEAVFGAMAKGDAWNFPVVREAIGYADALYGFKSGFDKAGKVLGVKSGGYWPGNMDKELTNHQSTVFLFDPDTGQLAALVGGNYLTAVRTAASSAVSIAHLARKDAKVLGMVGAGHQSQFQLRAAAEQRDFEKVVAWNPHPEMLPKLGAVAEELGLPFEAVTQEQLGAQADVIITITSAFEPLLMKDWIKPGTHIACMGTDTKGKQEVDAALVAAATVFTDEVAQSISIGEAQHAIAEGFLTEDRITPIGAVINGAHPGRSSDDEITLFDGTGVGLQDLAVASVAARLAEEEGSAQRVSL

SEQ ID NO: 432 - protein, 320 aa, Paracoccus denitrificans DSM 15418; identical to SEQ ID NO: 303

SEQ ID NO: 433 - protein, 328 aa, Ruegeria halocynthiae MOLA R1/13b
MNTQTDGLLIVGEDLCEQLVGRSQAFDAVQSVFAAMASGGARNFPVIREALGYADALYGFKSGFDRDGQVLGVKSGGYWPGNADKGLTNHQSTVFLFDPDTGQLSALVGGNYLTAVRTAASSAVSIAQLARKDAKVLGMVGAGHQSAFQLRAAAEQRDFEKVVAWNPHPDMLPRLAAVADEIGLEFEAVSQQELGAQADVIITITSAFEPLLMKDWIKPGTHLACMGTDTKGKMEVDPELVTSATVFTDEVAQSLTIGEAQHAAGTGALTESAITPIGAVINGDHPGRTGADEITLFDGTGVGLQDLAVASVAARLADEAGLAQRVAL

SEQ ID NO: 434 - protein, 320 aa, Paracoccus denitrificans DSM 413; identical to SEQ ID NO: 303

SEQ ID NO: 435 - protein, 321 aa, Roseivivax isoporae LMG 25204
MIIVPEREIAALMTREAAYDAVETVFAAMAAEDAYNFPVVREAIGHEDALYGFKGGFDRAGKVLGLKAGGYWPNNLERRGIINHQSTVFLFDPDTGRAHAMVGGNLLTALRTAAASSVSINHLARADARVIGMVGAGHQATFQLRAALAQRPFEKVIGWNLHPEMLPNLEKVADEAGLPFEAVDLPGLTEADVIVTITSSFAPSLMAAHVAPGTHLACMGTDTKGKQEVEAALLARATVFTDEVAQSVAIGEAQHAVAQGLIAEGDVTPIGAVINGTHPGRRSDEEITLFDGTGVGLQDLAVAARVVELAVEAGVAVEVDF

SEQ ID NO: 436 - protein, 321 aa, Citreicella thiooxidans DSM 10146
MLIVPEREIGALMTRASAFEAVEKVFAAMASGEAYNFPVIREAIGHEDALYGFKGGFDRAGLTLGLKAGGYWPNNLEKFRVINHQSTVFLFDPDTGKVAAMVGGNLLTALRTAAASSVSIAHLARRDAKVMGMVGAGHQATFQLRAALEQRPFEKVIGWNLHPEMLPNIETVADEAGLPFEAVALEGMREADVIVSITSSFAPSLMAAHVSPGTHLACMGTDTRGKQEVEAALLAVATVFTDEVAQSVSIGEAQHAVAEGLISESDVHQIGAVINGSHPGRRSDEEITLFDGTGVGLQDLAVAAAVVDLAVEKGIAIEVDV

SEQ ID NO: 437 - protein, 321 aa, Citreicella thiooxidans DSM 10146
MLIVPEREIADLMTREAAFSAVEQVFASMAAGDAYNFPVVREAIGHEDALYGFKGGFDRAGLTLGLKAGGYWPHNLEKRGMINHQSTVFLFDPDTGKAKAMVGGNLLTALRTAAASSVSIRHLAREDAKVIGMVGAGHQATFQLRAALEQRDFDKVIGWNLHPEMLPNLEKVAAEAGLPFEAVELEGMRAADVIISITSSFDAILMEEHVAPGTHIACMGTDTKGKQEVAPALLAKAAVFTDEVSQSVSIGEAQHAVAQGLIREADIAQLGAVINGAHPGRRSAEEITLFDGTGVGLQDLAVAAAVVDLAVEKGIAIEVDF

SEQ ID NO: 438 - protein, 321 aa, Antarctobacter heliothermus DSM 11445
MLIVPEREIANLMTREAAFDAVEKVFAAMASGDAYNFPVVREAIGHEDALYGFKGGFDRAGLTLGLKAGGYWPNNLEKRGLINHQSTVFLFDPDTGMVKAMVGGNLLTALRTAAASSVSIKHLARKDAKVLGMIGAGHQATFQLRAALEQRSFDKVIGWNYHPEMLPNIEKVASEAGVPFEAVDLPGMRAADVIISITSAFGPSLMADHVSPGTHVACMGTDTKGKQEVEAALLARAAVFTDEVAQSVSIGEAQHAVAQGLIQDSDIAQLGAVINGSHPGRISDDQITLFDGTGVGLQDLAVAAAVVDLAVAQGIAIEVDF

SEQ ID NO: 439 - protein, 321 aa, Nitratireductor sp. ZZ-1
MHIVSEATCREIMGRDDAFAAVEAIFSAMARGDAYNFPVIREAIGHADALYGFKSGFDRAGMVLGLKSGGYWPGNEKKGLTNHQSTVFLFDPDSGRPMAMVGGNHLTALRTAAASAVSIKHLARRDARVLGMVGAGFQSAFQMRAAVAQRDFDKVVGWNLHPEMLGRLEATAAELGLPFEAVDLDRLGAEADVIITITSSFAPILSLAQVRPGTHLACMGTDTKGKQEVDAALVAAATLFTDEVAQAAAIGECQHAVAAGLVDAAAITPIGAVIDGQHPGRSSPDEITLFDGTGVGLQDLAIASVAVAKAIDKGMAQSVAV

SEQ ID NO: 440 - protein, 321 aa, Rhizobium sp. CNPSO 671
MIIVPERAIADLIGSAECFTAVEHVFAAMARKSAYNFPVIREAIGYADALYGFKSGFDRESLSLGLKSGGFWPKNAESGLTNHQSTVFLFDADTGRCRAVVGGNLLTALRTAAASAISIKYLAREDAKILGIIGAGHQSTFQLRAAVQQRNFEKVVAWNYHPEMLTRLEEVAREIGLPFEAVDLDRLGAEADVIISITSSFSPSLMASQVRPGTHLACMGTDTKGKQEVDAKLVAASSIFTDEVAQAITIGECQHAIADGMIAAEDILEIGAVITGDVKGRRSADDITLFDGTGVGLQDLAVASAVVDLAVSKGVAIEVDF

SEQ ID NO: 441 - protein, 327 aa, Pseudomonas stutzeri NP_8HO
MQTQSPLLIVPEHLIADLISAQDCFAAVEQVFAAMARDTAYNFPVIREAIGHANALYGFKSGFDRESLALGLKSGGFWPRNADRGLTNHQSTIFLFDADTGRCRAVVGGNLLTALRTAAASAVSIRHLARPDARVLGMIGAGHQSTFQLRAALDQRDFDRVVGWNLNPADLDRLAKVADERGIPFQAVDLDQLGAQADVIITITSSFAPILQAAQVRPGTHLACMGTDTKGKQEVEAALLGKASVFTDEVAQSVTIGEAQHAVAQGLIAPDDITQIGAVINGDRPGRVSDDQITLFDGTGVGLQDLAVASAAVDLAVERGIAIAVQI

SEQ ID NO: 442 - protein, 321 aa, Ruegeria sp. ANG-R
MIIVPEKEIATLLGRTESYDAVEQVFAAMAAGDAYNFPVVREAIGHANALYGFKGGFDRAGMTLGLKAGGYWPNNLETHGLINHQSTVFLFDPDTGRVRAVVGGNLLTALRTAAASSVSINHLARKDAKVIGMVGAGHQATYQLRAALEQRSFEKVIGWNLHPEMLPNIANIASEAGLRFEAVELPGMVEADVIITITSSFAPILMSDHVSNGTHVACMGTDTVGKQEVGVDLITRATVFTDEVAQSITLGECQHVVAEGSKTEADIRQIGEVINGTHPGRQTDEEVTLFDGTGVGLQDLAVAGAVVDLAVERGIAIEVDF

SEQ ID NO: 443 - protein, 330 aa, Mameliella alba CGMCC 1.7290; identical to SEQ ID NO: 431

SEQ ID NO: 444 - protein, 321 aa, Pseudorhodobacter antarcticus CGMCC 1.10836
MWIVPEAKIAGLMDRATCFAAIEGVFGAMARGDAYNFPVIREAIGHADALYGFKSGFDRAGLALGLKSGGYWPGNEAKGLTNHQSTVVLFDPDTGRVKALVGGNLLTALRTAAASAVSIKHLARPDAKVLGMVGAGHQSAFQMRAAVEQRAFEKVVGWNFHPEMLDRLAGVAAELGLPFEAVSLDELGAQSDVIITITSSHKPILRSAQVKAGTHIACMGTDTKGKQEVDDLLVARATVFTDEVAQAISIGECQHAIASGLMAEAEIAELGAVINGSHKGRTSAEEVTLFDGTGVGLQDLAVAAAVVELAIAKGIAIEVDF

SEQ ID NO: 445 - protein, 321 aa, Loktanella sp. DSM 29012
MLIVPEREISNLMTRDAAFEAVEKAFAAMASEDAYNFPVIREAIGHEDALYGFKGGFDRAGLTLGLKAGGYWPHNLEKRGEINHQSTVFLFDPDTGKAKAMVGGNLLTALRTAAASSVSIKHLARKDAKVLGMIGAGHQATFQLRAALETHRFKKVIGWNFHPDMLPNIEKVANEAGVPFEAVDLPSMRDADVIISITSAFAPSLMADHVSPGTHVACMGTDTKGKQEVEAALLARASVFTDEVAQSISIGEAQHAIAEGLIKESDVAQLGAVINGTHKGRASDDEITLFDGTGVGLQDLAVAASVVDLAVAKGIAIEVDF

SEQ ID NO: 446 - protein, 320 aa, Paracoccus thiocyanatus ATCC 700171
MLVVPEKQIAGLMTPEAAFEAIEAVFASMARRKARNFPVVREAIGHEDALYGFKGGFDGVALVLGLKAGGYWPLNQKHGLINHQSTVFLFDPDTGRVAAAVGGNLLTALRTAAASAVSIKYLAPKGAKVLGMIGAGHQSTFQMRAAANVHRFEKVIGWNPHPEMLSRLADTATELGLPFEAVELDRLGTEADVIISITSSFSALLMDQHVKGPTHIAAMGTDTKGKQELDPALVARARIYTDEIAQSVSIGECQHAIAAGLIAQEAIRELGAVVAGRGPGRDGAEVTLFDGTGVGLQDLAVAAAVVELAKHKGVAQEVEI

SEQ ID NO: 447 - protein, 321 aa, Rhodovulum sulfidophilum TUT; identical to SEQ ID NO: 363

SEQ ID NO: 448 - protein, 321 aa, Roseovarius sediminilitoris DSM 29439
MFIVPEKEIAALVTRKDNFDAVEQVFASMAGGSAYNFPVIREAIGHADALYGFKSGFDRAALNLGLKSGGYWPGNAEKGLTNHQSTVFLFDADTGKCRAVVGGNLLTALRTAAAAAVSVAHLARKDSKVLGMIGAGHQATFQLQAVAEQRNFEKVVAWNRTSEKLASLQNVADDLGLPFESVSLDELGAQADVIVTIVSSQAAILNDAQVKPGTHIACMGTDTKGKQEVDANLVARATVFTDEIAQSISIGEAQHAIADGSLKQADISEIGAVINGDHPGRTSDDEVTLFDGTGVGLQDLAVASKVVDLAIEKGIAIEVDF

SEQ ID NO: 449 - protein, 321 aa, Leisingera sp. ANG-M1
MYIVPEKEIAGLMTREAAFDAVEKVFAAMASGDAYNFPVVREAIGHEDALYGFKGGFDRAGLTLGLKAGGYWPNNLEKRGLINHQSTVFLFDPDTGKAKAMVGGNLLTALRTAAASSVSIKHLARKDAKVIGMIGAGHQAKFQLRAALEQRQFEKVIGWNLHPDMLPNLQEVADEAGLPFEAVELDGMREADVIISITSSFDAILNTAQVSPGTHIACMGTDTKGKQEVDPQLLVAADVFTDEVAQSISIGETQHAVAQGLIQEADVAQIGAVINGTNPGRTSGDQITLFDGTGVGLQDLAVAASVVDLAVEQGIAIEVDF

SEQ ID NO: 450 - protein, 333 aa, Roseovarius azorensis DSM 100674
MMNTHAEATADGFVIVGEDICEKVISRADAFDAVEAVFAAMARGDAYNFPVVREAIGHADALYGFKGGFDRTGLSLGLKAGGYWPGNMARGLTNHQSTVFLFDPDTGRLSALVGGNYLTALRTAASSSVSIAHLAREDSKVLGMVGAGHQSTFQLRAAVEQRDFEKVVAWNPHPEMLPRLGAVAEELGLAFEAVSPEDLGAQADVIITITSAFEPLIMADWIRPGTHIACMGTDTKGKQEVDPALFSRATVFADEVAQSISIGEAQHAVGQGVIAESDITPVGAVINGTHGGRGSDEEITLFDGTGVGLQDLAVAAVAARLAREQGLVTPVTF

SEQ ID NO: 451 - protein, 321 aa, Sulfitobacter pseudonitzschiae DSM 26824
MLIVPEREIANLMTRAAAFDAVEQVFAAMAAGDAYNFPVVREAIGHEDALYGFKGGFDRAGLTLGLKAGGYWPNNLEKRNLINHQSTVFLFDPDTGRARAMVGGNLLTALRTAAASSVSIKHLARKDARVIGMVGAGHQATFQLRAALEQRDFDKVIGWNYHPEMLPNIEKIAREAGVPFQAVDLPGMVEADVIISITSAFSPSLMADHVAPGCHLACMGTDTKGKQEVEAALLARATVFTDEVAQSVSIGEAQHAVAEGLIAESDVHQLGAVINGTHAGRVSDDQITLFDGTGVGLQDLAVAAAVVDLAVAQGIAIEVDF

SEQ ID NO: 452 - protein, 321 aa, Ruegeria sp. CECT 5091
MIIVPEKEIGALLGRKESYSAVEQVFAAMASGDAYNFPVVREAIGHADALYGFKGGFDRAGMTLGLKAGGYWPNNLETHGLINHQSTVFLFDPDTGRVKAIVGGNLLTALRTAAASSVSINHLARKDAKVIGMVGAGHQATFQLRAALEQRDFEKVIGWNLHPEMLPNIEKVANEAGLPFEAVELPGLTEADVIVTITSSFEPTLLSEHVSDGTHVACMGTDTVGKQEVGADLVIRASVFTDEVAQAITLGESQHAVAAGDKAEADIHQIGAVINGTHAGRNSDDEVTLFDGTGVGLQDLAVASAVVDLAVKQGIAIEVDF

SEQ ID NO: 453 - protein, 322 aa, Pseudoruegeria haliotis DSM 29328
MLIVPEREIGNLMTRAAAFDAVEGVFAAMASKNAYNFPVVREAIGYEDALYGFKGGFDRAGKTLGLKAGGYWPNNLEKFDLINHQSTVFLFDPDTGRVKAIVGGNLLTALRTAAASSVSIKHLAREDAKVLGMIGAGHQATFQLRAALEQRSFEKVVGWNYHPEMLPNIEKVAAEAGLPFEAAQLDRLGQEADVVISITSAFAPSLMADHVSPGTHIACMGTDTKGKQELDAALLPRATVFTDEVAQSVSIGEAQHAVAQGLIAQSDVQQIGAVINGTHPGRTSAEEITLFDGTGVGLQDLAVAASVVDLAVQQGIAIEVDF

SEQ ID NO: 454 - protein, 320 aa, Psychrobacter sp. ENNN9_III
MSEANSVHSDEGLLIVSEDACKSVIDRPSAFTAVENVFASMSRGDAYNFPVIREAIGYADALYGFKSGFDRAGKSLGLKSGGYWPGNADKGLTNHQSTIFLFNPDNGKLRALVGGNYLTAVRTAAASAVSIAHLARKDSKVLGMVGAGHQSTFQLRAALEQRNFEKVVAWNNNKDRLKNLQAVAEELGVPFESVEREQLCSEADVIITITSAFEPLLMKEWIKPGTHIACMGTDTVGKQEVDVNLISAATVFTDEIAQSISLGEAQHAIKSSAIKESDITTLGDVINGEHPGRSSDDEITLFDGTGVGLQDLAVASAAAK

SEQ ID NO: 455 - protein, 317 aa, Pararhodobacter aggregans DSM 18938
MLVVPERLIAGLMGPDEAFEAVAEVFRQTAGGAARNFPVVREALGGGRQYGFKSGMGPGALGVKAGGYFPGNAARGITNHQSVVTLFDPETGRPEAMIGGNLLTALRTAAAAAVSIDALARPGARVLGIVGAGHQAAFQLRAAARVRRFERVIAWNRTPERLAGLAAVAEELGLPFEAVPLAGMREAEVIVTITSSPAYALAAAHVSPGTHLACMGTDTIGKQEVEPALLGAARVFTDEPAQSVTLGEAQHAVAQGLLDPARIVPLGAVLTGEAPGREDPDQITLYDGTGVGLQDLAVAARVLALAKARGLAIPVEI

SEQ ID NO: 456 - protein, 321 aa, Rhodovulum kholense DSM 19783
MFVVPESEIAGLVSPAQCFEAVEAVFSAMARDEAYNFPVIREAIGHADALYGFKSGFDRAGKVLGLKSGGYWPGNVEKGLTNHQSTVVLFDPDTGRPAALVGGNLLTALRTAAASAVSIRHLARCDSRVLGLLGAGHQSAFQMRAAVAERPFEKVIGWNYHPEMLPRLAETAVELGLPFEAVSLEDLGAQADVIVTISSSVAAQLLDAHVRPGTHLACMGTDTRGKQEIDAAIFARARVFTDEVAQSVEIGEAQHAVAAGLIGAGDIVQIGAVINGTVPGRQSEDDITLFDGTGVGLQDLAVAARAVAAARAKGVAVEVDL

SEQ ID NO: 457 - protein, 321 aa, Rhizobium yanglingense LMG 19592
MIIVPESAIGELVSLEDCVDAVEKVFVSMAERSAHNFPVVREAIGYADALFGFKSGFDRKGLALGLKAGGFWPNNADKGLTNHQSTVFLFDPETGRCRAVVGGNLLTALRTAAASAVSIKHLARNDAKVLGMVGAGHQASFQLRAAVQQRQFEKVVAWNYHPDMLPKLAAVAEELGIPFEAVNLDRLGAEADVIITITSSFQPILKASQIKPGTHLACMGTDTKGKQEVDVALVAGATLFTDEIAQAISIGECQHAIAQGMIAPIDIAEIGAVINGQKPGRTSPDEITLFDGTGVGLQDLAVAQAAVGLALARGTAVEVDF

SEQ ID NO: 458 - protein, 321 aa, Labrenzia sp. C1B70; identical to SEQ ID NO: 417

SEQ ID NO: 459 - protein, 320 aa, Starkeya novella DSM 506 chromosome
MYVVAEKDIAGLMTPEAAFEAIEAVFASMARRQAYNFPVVREAIGHADALYGFKGGFDGAGLALGLKAGGYWPHNQERGLINHQSTVFLFDPDSGRVSAAVGGNLLTALRTAAASAVSIKYLAPKGAKVLGMIGAGHQSAFQMRAAARVHPFEKVIGWNPHPEMLGRLSDTAAELGLPFEAVELERLGEEADVIISITSSFGPLLMDDHVKGPTHIAAMGTDTKGKQELDPGLVARARLFTDEIAQSVSIGEYQHAVAQGLITQDRIGELGAVVTGDDAGRGDAEVTIFDGTGVGLQDLAVAAKVVELAKQKGIAQQVEV

SEQ ID NO: 460 - protein, 321 aa, Ruegeria mobilis 45A6
MYIVPERAIADLMTRDAAFDAVEKVFAAMAAGDAYNFPVVREAIGHEDALYGFKGGFDRAGLSLGLKAGGYWPNNLEKRGLINHQSTVFLFDPDTGKVRAMVGGNLLTALRTAAASSVSIKHLAREDAKVIGMIGAGHQAKFQLRAALEQRDFDKVIGWNLHPEMLPNLEEIATEAGLPFEAVELDGLKEADVIISITSSFDAILKADQVSPGTHIACMGTDTKGKQEVDPQLLVRATVFTDEVAQSTSIGEAQHAVAQGLIAEADVAQLGAVINGAHPGRSSAEQITLFDGTGVGLQDLAVAASVVELVVKKGIAIEVDF

SEQ ID NO: 461 - protein, 321 aa, Oceaniovalibus guishaninsula JLT2003
MIIVPEAAIANLVTPEASFAAVEKVFASMAAKSAYNFPVIREAIGHADALYGFKSGFDRAALNLGLKSGGYWPGNADKGLTNHQSTVFLFDADTGRCRAVVGGNLLTALRTAAAAAVSVAHLARRDAKVLGIVGAGHQAAFQLRAVAAQRPFERVVAWNRSPEKLSGLREVAEGLGLAFETVSLDDLGAQADVIVTITSSFDAILGADQVRPGTHLACMGTDTKGKQEVDAALLGRATVFTDEIAQSTTIGEAQHAIADLTLRLEDIVELGAVINGDHPGRSSDDEITLFDGTGVGLQDLAVAAAVVDLAVERGVATEVEF

SEQ ID NO: 462 - protein, 321 aa, Loktanella vestfoldensis DSM 16212
MIIVPEREIAGLLGRADAYMAVEAVFAAMASGDARNFPVIREAIGHADALYGFKSGFDRAGLALGLKSGGYWPGNAAKGLTNHQSSVFLFDADTGKCRAVVGGNLLTALRTAAAAAVSINHLARVDARVLGIVGAGHQSVFQLRAALEQRDFTRVVAWNRDPAKLARLSDVAAEHGLPFAAVSLAELGAAADVIITIVSAHEPLLMDAHIRPGTHISCMGTDTKGKQEIDAAIFARASVFTDEIAQSTSIGEAQHAVAAGIISADRITALGAVINGTHQGRTSADEITIFDGTGVGLQDLAVASAVVDLAVTQGVATIVDF

SEQ ID NO: 463 - protein, 321 aa, Rhizobium etli bv. mimosae Mim1
MIIVPESAIGELVSLEDCVDAVEKVFVSMAERSAHNFPVVREAIGYQDALFGFKSGFDREGLALGLKAGGFWPNNADKRLTNHQSTVFLFDPETGRCRAVVGGNLLTALRTAAASAVSIKHLARRDAKVLGMVGAGHQASFQLRAAMQQRPFEKVVAWNYHPEMLPKLAAVAQELAVPFEAVDLDRLGGEADVIITITSSFQPILKALQIKPGTHMACMGTDTKGKQEVDAALVAEATLFTDEIAQAISIGECQHAVARGMIAPIDIVEIGAVINGQQPGRTSPDQITLFDGTGVGLQDLAVAQAAVGLALARGMAVEVDF

SEQ ID NO: 464 - protein, 321 aa, Methylobacterium komagatae DSM 19563
MIIVPENRIDGLLTEADCFTAVEKVFASMARRTAGNFPVVREAIGHADALYGFKSGFDRESLALGLKAGGFWPGNAAKGLTNHQSTVFLFDADTGRCRAVVGGNLLTALRTAAASAISIKHLARKDARVLGMIGAGHQSAFQLRAALAQRPFERVLAWNLHPGMFGRMEAVAREHGVPFEVAELDRLGAEADAIVTITSSFAPILKASHVKPGTHIACMGTDTKGKQEVEAELLAAATVFTDEVAQSVSIGEAQHAIGRGLLTEGAIVEIGAVINGDHPGRTSDEEITLFDGTGVGLQDLAVASAAVDLAVAKGLAVEVEF

SEQ ID NO: 465 - protein, 321 aa, Rhizobium tropici YR635
MIIVPETEIAGLVTPADCFRAVEGVFASMADKSAYNFPVIREAIGHADALYGFKSGFDRKGLALGLKAGGFWPNNVHRGLTNHQSTVFLFDADTGKCRAVVGGNLLTALRTAAASAISIKYLARKDAKVLGMIGAGHQATFQLRAALAQRSFERIVGWNLHPDMLSRLEEVAKEEGLPFEAVDLDRLGAEADVIISITSSFAPMLKASQVRAGTHLACMGTDTKGKQEVEAEILAAAAVFTDEVAQAVTIGESQHAIERGLIREEAIVEIGAVINGTHPGRTSADQITLFDGTGVGLQDLAVASAAVELALAKGVAIEVDF

SEQ ID NO: 466 - protein, 321 aa, Aurantimonas altamirensis DSM 21988
MIIVPERDIAGLIGPADCFVAVEGVFAAMARRTARNFPVVREALGHADALYGFKSGFDGESLALGLKSGGFWPGNMARGLTNHQSAVFLFDADTGQCRAIVGGNRLTALRTAAASAISIKYLARQDARTLGIIGAGHQSTFQLEAALEQRAFEKIVGWNVEPEMLSKLEEVAARRGLPFERVDLDGLGAQADVIITITSSFAPILKVAQVRPGTHIACMGTDTVGKQEVEAELVARASVFTDEVAQAVTLGESQHAVAAGLVDAGSIVEIGQVVTGGHAGRTTPEEITLFDGTGVGLQDLAVASAIVDLAVRKGIATEVEF

SEQ ID NO: 467 - protein, 321 aa, Sulfitobacter sp. MCCC 1A00686; identical to SEQ ID NO: 451

SEQ ID NO: 468 - protein, 321 aa, Methylobacterium sp. 13MFTsu3.1M2
MIIVPEHAIDGLLTEAECFTAVEQVFASMARRRAGNFPVVREAIGHADALYGFKSGFDRDSLALGLKAGGFWPGNAAKGLTNHQSTVFLFDADTGRCRAVVGGNLLTALRTAAACAISVRHLARKDARVLGMIGAGHQSAFQLRAALAQRPFEGVLAWNLHPGMFGRMEAVAREHGVPFEAVDLDRLGSEADVVVTITSSFAPILKAAQVRPGTHLACMGTDTRGKQEVEAELLAGATVFTDEVAQSVSIGEAQHAVARGLLAADSIVEIGAVINGDHPGRVSESEITLFDGTGVGLQDLAVAAVAVDRAVAKGLATEVDV

SEQ ID NO: 469 - protein, 321 aa, Methylobacterium sp. 275MFSha3.1
MIIVPEHAIDGLLTEAECFTAVEQVFASMARRRAGNFPVVREAIGHADALYGFKSGFDRDSLALGLKAGGFWPGNAAKGLTNHQSTVFLFDADTGRCRAVVGGNLLTALRTAAACAISVRHLARKDARVLGMIGAGHQSAFQLRAALAQRPFDRVLAWNLHPGMFGRMEAVAREHGVPFEAVDLDRLGSEADVVVTITSSFAPILKAAQVRPGTHLACMGTDTRGKQEVEAELLAGATVFTDEVAQSVSIGEAQHAVARGLLAADAIVEIGAVINGDHPGRVSESEITLFDGTGVGLQDLAVAAVAVDRAVAKGLATEVDF

SEQ ID NO: 470 - protein, 320 aa, Paracoccus pantotrophus DSM 11073; identical to SEQ ID NO: 344

SEQ ID NO: 471 - protein, 321 aa, Marinovum algicola DSM 10251
MFIVPERDIADLMTREAAFDAVEKVFAAMASGDAYNFPVVREAIGHEDALYGFKGGFDRAGLTLGLKAGGYWPNNLEKRGIINHQSTVFLFDPDTGKAKAMVGGNLLTALRTAAASSVSIKHLARKDAKVIGMVGAGHQAKFQLRAALEQRDFEKVIGWNFHPEMLPNLEEVASEAGLPFEAVALEGLAEADVIISITSSFDAILHADHVAPGTHIACMGTDTKGKQEVETALLGKATVFTDEVAQSISIGEAQHAIESQILRAEDITQVGAVINGTHPGRISDDEITLFDGTGVGLQDLAVAAAVVDLAVAKGLAIEVDF

SEQ ID NO: 472 - protein, 320 aa, Paracoccus versutus DSM 582
MLVVAEKEIAGLMTPEAAFEAIEAIFASMARRKAYNFPVVREAIGHEDALYGFKGGFDASALVLGLKAGGYWPNNQKHNLINHQSTVFLFDPDTGRVTAAVGGNLLTALRTAAASAVSIKYLAPKGAKVLGMIGAGHQSAFQMRAAANVHPFEKVIGWNPHPEMLSRLADTAAELGLPFEAVELDRLGTEADVIISITSSFSPLLMDQHVKGPTHIAAMGTDTKGKQELDPALVARARIFTDEVAQSVSIGECQHAIASGLIREDQIGELGAVVAGDHPGRVDAEVTLFDGTGVGLQDLAVAQKVLEIAKEKGLAQEVEI

SEQ ID NO: 473 - protein, 321 aa, Thalassobius aestuarii DSM 15283
MLIVPERDIADLMTRAAAFEAVEQVFAAMASKDAYNFPVVREAIGHEDALYGFKGGFDRAGLTLGLKAGGYWPNNLEKRGLINHQSTVFLFDPDTGMVRAMVGGNLLTALRTAAASSVSIKHLARKDAKVLGMIGAGHQATFQLRAALEQRDFEKVIGWNYHPEMLPNIATVAEEAGVPFEAVDLEGMREADVIVSITSAFAPSLLADHVSEGTHVACMGTDTKGKQEVEARLLAKATVFTDEVAQSISIGEAQHAVAEGLIRAEDVAELGAVINGTHPGRSSDDQITLFDGTGVGLQDLAVAASVVDLAVEKGVAIEVDF

SEQ ID NO: 474 - protein, 331 aa, Litoreibacter janthinus DSM 26921
MGGMQTDAHKLTIVPEGMIADLLTRQAAFDAVEKVFASMASGEARNFPVVRAALGHEDALYGFKGGFDRAGGVLGLKAGGYWPHNLERRGLINHQSTVLLFDPDSGRVNAMVGGNLLTALRTAAASSVSIKHLARDDAKTLGMIGAGHQSAFQLRAALEIRDFEKVIGWNLHPDKLGSLAQVAKSMGVPFEAVPLERMTEADVIISITSSFNAVLMADHVSPGTHVACMGTDTIGKQEVEVALLAKASVFTDEVAQSVSIGEAQHAISMGLITETDVKQIGAVISGSHVGRQSDDEITLFDGTGVGLQDLAVADSIVKAAVAQGLATVVQL

SEQ ID NO: 475 - protein, 327 aa, Paracoccus sp. 361
MQTQSPLLIVPEHLIADLISAQDCFAAVEQVFAAMARDTAYNFPVIREAIGHADALYGFKSGFDRESLALGLKSGGFWPRNADRGLTNHQSTIFLFDADTGRCRAVVGGNLLTALRTAAASAVSIRHLARWDARVLGMIGAGHQSIFQLRAALDQRDFDRVVGWNLNPADLDRLAKVADERGIPFQAVDLDQLGAQADVIITITSSFAPILQAAQVRPGTHLACMGTDTKGKQEVEAALLGKASVFTDEVAQSVTIGEAQHAVAQGLIAPHDIIQIGAVINGDRPGRVSDDQITLFDGTGVGLQDLAVASAAVDLAVERGIAIAVQI

SEQ ID NO: 476 - protein, 321 aa, Paracoccus homiensis DSM 17862
MLIVPEREIANLMTRQAAFEAVEKVFAAMAAGDAYNFPVVREAIGHEDALYGFKGGFDRAGLTLGLKAGGYWPNNLEKRGLINHQSTVFLFDPDTGKVKAMVGGNLLTALRTAAASSVSIKHLARPDARVLGMVGAGHQATFQLRAALEQRSFDKVIGWNYHPEMLPNIQKVADEAGVPFETVELNGMRQADVIISITSAFAPSLMADHVAPGCHVACMGTDTKGKQEVEAALLARATVFTDEVAQSVQIGEAQHAVAQGLIAESDVTQIGAVINGTHPGRDSDDQITLFDGTGVGLQDLAVAASVVDLAVQQGIAITVDF

SEQ ID NO: 477 - protein, 330 aa, Ponticoccus sp. UMTAT08
MKDMPETQGLVIVGEAECERLVGRKDAFDAVEAVFGAMAKGDAWNFPVVREAIGYADALYGFKSGFDKAGKVLGVKSGGYWPGNMDKGLTNHQSTVFLFDPDTGQLAALVGGNYLTAVRTAASSAVSIAHLARKDAKVLGMVGAGHQSQFQLRAAAEQRDFEKVVAWNPHPEMLPKLGAVAEELGLPFEAVTQEQLGAQADVIITITSAFEPLLMKDWIKPGTHIACMGTDTKGKQEVDAALVAATTVFTDEVAQSISIGEAQHAIAEGSLTEDRITPIGAVINGAHPGRSSDDEITLFDGTGVGLQDLAVASVAARLAEEEGSAKRVSL

SEQ ID NO: 478 - protein, 334 aa, Marinobacter psychrophilus 20041
MDTSSEALTQPHQILIVSEDACQKVIGRHEAFQAVESVFSSMAKGSAYNFPVVREAIGHANALYGFKSGFDREGLVLGVKAGGYWPGNVVQGRTNHQSIVALFDPDTGQLKALVSGNYLTAIRTAASSAVSIAHLARKNAKVLGMIGAGFQSTFQLHAALEQRDFEKVVAWNTHPEHLTRLADVCREHNLPFEAVSLQALGSQSDVIITITSASEPLLQAAWVKPGTHLACMGTDTKGKQEIDHRILAQATVFTDEIDQSISIGEAQHAVTARILSAEQITPIGEVINGLHQGRQSEQEITLFDGTGVGLQDLAVASAAASLAEVRGLAQRVTL

SEQ ID NO: 479 - protein, 321 aa, Methylobacterium sp. Leaf361
MIIVPEHAIDGLLTEAECFTAVEQVFASMARRRAGNFPVVREAIGHADALYGFKSGFDRDSLALGLKAGGFWPGNAAKGLTNHQSTVFLFDADTGRCRAVVGGNLLTALRTAAACAISVRHLARKDARVLGMIGAGHQSAFQLRAALAQRPFERVLAWNLHPGMFGRMEAVAREHGVPFEAVDLDRLGAEADVVVTITSSFAPILKAAQVRPGTHLACMGTDTRGKQEVEAELLAGATVFTDEVAQSVSIGEAQHAVTRGLLAADSIVEIGAVINGDHPGRVSESEITLFDGTGVGLQDLAVAAVAVDRAVAKGLATEVDV

SEQ ID NO: 480 - protein, 332 aa, Aestuariivita boseongensis BS-B2
MGLDGAMTDSAVTIVPEGEIAGLITPQIAFDAVEATFAAMSRKSAYNFPVIRESIGHADALYGFKSGFDRDSLALGLKSGGYWPGNEAKGLTNHQSTVILFDADTGKVKALVGGNLLTALRTAAASAVSIKHLAREDAKVLGMIGAGHQSAFQMRAAVAQRNFEKVVGWNYHPEMLSRLEDTATELGLPFEAVSLEELGAQSDVIISITSSFAPSLLDAHVKPGTHIAAMGTDTKGKQEIDAPILARATVFTDEIAQSITIGEAQHAIADGSLTEGQITEIGAVINGDHAGRTSADEITVFDGTGVGLQDLAVARVAVDLAQAKGVASKVDF

SEQ ID NO: 481 - protein, 321 aa, Paracoccus isoporae DSM 22220
MLIVPEREIADLMTRSAAFDAVEKVFAAMASGDAYNFPVIREAIGHADALYGFKGGFDRAGLTLGLKAGGYWPNNLDQHGIINHQSTVFLFDPDTGRVRAMVGGNLLTALRTAAASSVSIRHLARDDAKVIGMIGAGHQAKFQLRAALEQRDFEKVIGWNLHPEMLPNLEEVAAEAGLPFEAVELDGIREADVIISITSSFDAILMADQVSPGTHIACMGTDTKGKQEVDPALLARATVFTDEVAQSVSIGEAQHAVAAGLIAESDITQIGAVINGTHPGRASAEEITLFDGTGVGLQDLAVAAAVVDLAVQNGVAVEVDF

SEQ ID NO: 482 - protein, 321 aa, Aminobacter aminovorans KCTC 2477
MIIIPERDIAGLVSAADCFVAVEQTFASMAKQSARNFPVIREALGHADALYGFKSGFDRESLALGLKSGGYWPNNAQKGLTNHQSTVFLFDADTGRCRAIVGGNLLTALRTAAASAVSIKHLARPDSKVLGIVGAGHQSTFQLRAALEQRPFEKVLAWNKTPEKLERLASVAREKGLPFQSVSLEQLCGEADVVITITSSFSPVIAEGLIRPGTHLACMGTDTKGKQEVAPEIVAGSTVFTDEVVQSTSIGEAQHAFRLGMIDAAAIIPIGVVVNGDHPGRRSAEEITLFDGTGVGLQDLAVASAAVDLALARGTAIEVDA

SEQ ID NO: 483 - protein, 321 aa, Aminobacter aminovorans KCTC 2477
MIIVPEREIAWLVSDADCFAAVERVFASMAKKSASNLPVVREAIGHLDAIYGVKSGIDREGLVLGLKSGGFWPNNVSRGLTNHQSTIMLFNADTGECRAVVGANLLTALRTAAASAISIKYLSRPDSKVLGIIGAGHQSTFQLKAALQQRAFEKVVGWNIVPQHLARLETVAAEHGLPFERVDLDTLGAQADVIITITSSFDPILRAGQVRPGTHLACMGTDTKGKQEVDARLLANATVFTDEVAQAVTMGETQHAVAEGLVDASAIIAIGAVINGDHSGRVSAEEITLFDGTGVALQDLAVASVAVERAVATGVATTIAF

SEQ ID NO: 484 - protein, 321 aa, Loktanella litorea DSM 29433
MIIVPEREIADLMTRAAAFDAVEKVFAAMAADDAYNFPVVREAIGHEDALYGFKGGFDRAGKVLGLKAGGYWPHNLEKRGEINHQSTVFLFDPDTGKAKAMIGGNLLTALRTAAASSVSIKHLAREDAKVMGMIGAGHQATFQLRAALEQRSFEKVIGWNYHPDMLPNIAKIAEEAGLPFEAVDLPGMAEADVIISITSAFAPSLMADHVSAGTHIACMGTDTKGKQEVEAALLAKATVFTDEVAQSVSIGEAQHAVAEGLIAESDVHQLGAVINGTHPGRVSADDITLFDGTGVGLQDLAVAASVVDLAIEKGIAIEVDF

SEQ ID NO: 485 - protein, 332 aa, Marinobacterium lutimaris DSM 22012
MTTPASGAGNPISIVSEAVCQQIVGRPEAFKAVENVFAAMARGDAYNFPVVREAIGHADALYGFKSGFDRAGMALGVKSGGYWPGNVQKDLTNHQSTVILFDPDTGQLKSLVGGNYLTAVRTAAASAVSIAHLARKDAKVLGMIGAGHQSTFQLRAALEQRDFEKVVAWNPHPEHLPRLAAVCEELRVPFEAVTQQELGAQADVIITITSAFEPLLLKEWIKPGTHIACMGTDTKGKQEVDPALLAAASVFTDEVAQSVLLGEAQHAVASGLIAESDITPIGEVINGTHVGRRDDQEITLFDGTGVGLQDLAVASAAAELADQKGLSQTIVL

SEQ ID NO: 486 - protein, 330 aa, Rubrimonas cliftonensis DSM 15345
MKDAADAAAIAIVSEDVCKEVVSRADAFEAVEKVFAAMARGDAYNFPVIREAIGHADALYGFKSGFDRAGLVLGLKSGGYWPGNAARGLTNHQSTVFLFDPDTGRLRALVGGNHLTALRTAAASAVSIAHLARRDAKVLGMVGAGHQAQFQLRAAAEQRRFERVVAWNYHPDMLPKLGAVAAEIGLPFEAVERERLCAEADVIITIGSSTEPQIMADWVKPGTHLACMGTDTRGKQEVDPALLARATVFTDEVAQSITIGEAQHAVAQGLIGEDAVTPLGRVINGDHPGRTGDDEITLFDGTGVGLQDLAAAAVAMARAVESGKAQTLTL

SEQ ID NO: 487 - protein, 321 aa, Planktotalea frisia SH6-1 (PFRI); identical to SEQ ID NO: 395

SEQ ID NO: 488 - protein, 321 aa, Aureimonas altamirensis ON-56566
LIIVPERDIAGLIGPADCLAAVEGVFAAMARGTARNFPVVREALGHADALYGFKSGFDAESLALGLKSGGFWPGNMARGLTNHQSTIFLFDADTGQCRAIVGGNRLTALRTAAASAISIKYLAREDARVLGIIGAGHQSTFQLEAALEQRAFEKIVGWNVEPDMLSKLEEVAARRGLPFERVDLDGLGAQADVIITITSSFAPILKAAQVRPGTHIACMGTDTVGKQEVEAELVSRASVFTDEVAQAVTLGESQHAVAAGLVDAGSIVEIGQVVTGAHPGRTSAEEITLFDGTGVGPQDLAVASAVVDLAVRKGIATEVEF

SEQ ID NO: 489 - protein, 334 aa, Marinobacter sp. Hb8
METSSKEPSQPHQILIVNEDACREVIGRHEAFQAVEAVFASMARGGAYNFPVVREAIGHADALYGFKSGFDREALVLGVKSGGYWPGNAARGLTNHQSTVVLFDPDTGRLKALVGGNYLTAVRTAASSAVSIAHLARKDAKVLGMVGAGYQSTFQLKAALEQRAFEKVVAWNAHPEHLTRLAAICEEKGIPFEGVSRQELGAQSDVIITITSAFEPLLDADWIKPGTHLACMGTDTKGKQEVDHKLLAQATVFTDEIAQSISIGEAQHAVAAQILSEDQITPIGEVINGTNPGRQSEADITLFDGTGVGLQDLAVASEAARLAETGGLAQRVTL

SEQ ID NO: 490 - protein, 329 aa, Ruegeria sp. ZGT108
MKDMSDNGLLIVSEDLCQQLVGRKEAFDAVQDVFAAMARGDAYNFPVIREAIGYADALYGFKSGFDRAGQVLGVKSGGYWPGNTEKGLTNHQSTVFLFDPDTGRLSALVGGNYLTAVRTAASAAVSIAHLARRDSKVLGMVGAGHQSTFQLRAAAEHRDFEKVVAWNPHPEMLPRLEGVAHEVGLEFQAVTQEELGAQADVIITITSAFEPLLMKDWIKPGTHLACMGTDTKGKQEVDAMLVAHATVFTDEVAQSITIGETQHAVADGQLTKDQITPIGAVINGDHPGRGSDEEITLFDGTGVGLQDLAVASVAAKLADKAGLAGRATL

SEQ ID NO: 491 - protein, 320 aa, Paracoccus sediminis DSM 26170
MWVVPEHEIAGLMTPEAAFDAVEAVFAAMARGDARNFPVVREALGHEDALYGFKGGFDGAGMTLGLKAGGYWPNNQKHGLINHQSTVFLFDPDTGRVSAAVGGNLLTALRTAAASAVSSKYLAPEGARVLGMIGAGHQSAFQMRAAVRFGQFEKVVGWNPHPAMLSRLADTAAELGLPFEAVDLPQLGADADVIITITSAFEPLLLDGHVTGPTHIAAMGTDTKGKQELDPALVARARLFTDEVAQSVSIGEFQHASAQKTVSADDITALGQVIIGNHPGRGDAQVTIFDGTGVGLQDLAVASAVVELAKQHGKAIQVAI

SEQ ID NO: 492 - protein, 321 aa, Ruegeria scottomollicae DSM 25328
MYIVPERAIADLMTRKAAFDAVEQVFAAMAAGDAYNFPVVREAIGHEDALYGFKGGFDRAGLTLGLKAGGYWPNNLEKRGLINHQSTVFLFDPDTGKVRAMVGGNLLTALRTAAASSVSIKHLAREDAKVIGMIGAGHQAKFQLRAALEQREFDKVIGWNLHPEMLANLEEVATEAGLPFEAVELDGLKEADVIISITSSFDAILKADQVSPGTHIACMGTDTKGKQEVDPELLVRADVFTDEVAQSISIGEAQHAVAQGLIAEADVAQLGAVINGAHPGRTSAEQITLFDGTGVGLQDLAVASSVVELAVKQGIAIEVDF

SEQ ID NO: 493 - protein, 321 aa, Rhizobium leguminosarum CGMCC 1.2553T
MIIVPESAVRDLVSLEDCVNAVEKAFVSMAERSAQNFPVVREAIGYEDALFGFKSGFNREGLALGLKAGGFWPNNASKGLTNHQSTVFLFDPETGRCRAVVGGNLLTALRTAAASAVSIKYLARKDAKVLGMVGAGHQASFQLRAAVQQRAFEKVVAWNFHPEMLPKLAAVADELAIPFEAVELDRLGDEADVIITITSSFQPILKAQQVRPGTHLACMGTDTKGKQEVDAALFASATLFTDEIAQAISIGESQHAIAQGLVAPVDIGEIGAVISGRIPGRSSADQVTLFDGTGVGLQDLAVAQAAVELAIARGTAVEIEI

SEQ ID NO: 494 - protein, 321 aa, Sulfitobacter sp. HI0021
MLIVPEREIANLMTREAAFDAIEKVFAAMASGDAYNFPVVREAIGHEDALYGFKGGFDRAGLSLGLKAGGYWPNNLEKRNLINHQSTVFLFDPDTGKVKAMVGGNLLTALRTAAASSVSIKHLARKNATVIGMVGAGHQATFQLRAALEQRKFEKVIGWNYHPEMLPNIEKVAHEAGVPFEAVDLPGMTEADVIISITSAFSPSLMADHVSPGTHIACMGTDTKGKQEVEAALLARASVFTDEVAQSVSIGEAQHAIAEGLIKDTDVAQLGAVINGTNPGRTSDHQITLFDGTGVGLQDLAVAAKVVDLAVEQGVAIDVDF

SEQ ID NO: 495 - protein, 321 aa, Sulfitobacter sp. HI0076; identical to SEQ ID NO: 494

SEQ ID NO: 496 - protein, 321 aa, Thalassobius mediterraneus CECT 5118; identical to SEQ ID NO: 333

SEQ ID NO: 497 - protein, 332 aa, uncultured Rhodobacteriaceae sp. PT6CLA
MNDMTQAQTDGLIIVSEEICQQVIGRQDAFDAVEAVFGAMAKGDAYNFPVIREAIGHADALYGFKSGFDRAGLALGLKSGGYWPGNADKGLTNHQSTVFLFDPDTGKLKALVGGNYLTALRTAAASSVSIAHLARKDAKVLGMVGAGHQSAFQLRAAAEQRDFEKVVAWNPHPEMLPKLGEVATQIGLEFEAVERDQLGAEADVIITITSAFEPLMMASQIKPGTHIACMGTDTVGKQEVDPALLAAATVFTDEVAQSISLGEAQHAIAQGLIAEADITPIGNVINGTHPGRSSADEITLFDGTGVGLQDLAVASVAADLAAKAGTATRVAL

SEQ ID NO: 498 - protein, 321 aa, Sinorhizobium terangae WSM1721
MIIVPENQIAGLITPADCLAAVEGVFASMAKRSAYNFPVIREAIGHADALYGFKSGFDRDSLALGLKSGGFWPNNVQKGLANHQSTVFLFDADTGRCRAVVGGNLLTALRTAAASAVSIKYLARRDAKVLGMIGAGHQSTYQLRAAVEQRPFEKVLAWNLHPEMLSRLEGVARELELPFETVDLDRLGDEADVIISITSSFAPILKASQVRPGTHLACMGTDTKGKQEMDAELLAAATVFTDEVAQAVTIGECQHAIEKGLISRDDIVEIGAVITGRHTGRSSPEEITLFDGTGVGLQDLAVASAAVELALSKGTAIEVDF

SEQ ID NO: 499 - protein, 321 aa, Ruegeria sp. TW15; identical to SEQ ID NO: 416

SEQ ID NO: 500 - protein, 321 aa, Rhizobium sp. BR816
MIIVPENQIAGLITPADCLLAVEGVFASMAERSAYNFPVIREAIGHADALYGFKSGFDRDSLALGLKSGGFWPNNVEKGLANHQSTVFLFDADTGGCRAVVGGNLLTALRTAAASAVSIKYLARNDAKVLGMIGAGHQSTYQLRAAVEQRPFEKVLAWNLHPEMLSRLERIARELELPFETVDLDRLGAESDVIISITSSFAPILKASQVRPGTHLACMGTDTKGKQEVDPELVAAATVFTDEVGQAVTIGECQHAIDKGLISKDDIVEIGAVITGRHKGRSSSEEITLFDGTGVGLQDLAVASAAVELALSKGAAIEVDF

SEQ ID NO: 501 - protein, 334 aa, Glaciecola sp. ANT9081 (cola82)
MIIQNDEMNTDKGITIISEAICEAVVGRPEAFTAVENVFAAMAKGDAYNFPVVREAIGHADALYGFKSGFDRAGMALGVKSGGYWPGNAKKNLTNHQSTIFLFDPDTGQLISLVGGNHLTAMRTAASSAVSIAHLARKDAKVLGMVGAGHQSTFQLRAALEQRKFEKVVAWNLHSADLQRLAKVCEELGLPFEALERKELGAQADVIITITSAFEPLMMKEWIKPGTHIACMGTDTKGKQEVDPELLVAATVFTDEIAQSVSIGEAQHAIASGTIKAEDIVPIGEVINGTHPGRLSDEEITLFDGTGVGLQDLAVAQAAAVLAEKQGLAVSINL

SEQ ID NO: 502 - protein, 321 aa, Paracoccus pantotrophus J40
MWIVPEKEIAGLMTPEAAFDAVQAVFAAMASGKASNFPVVREAIGHEDALYGFKGGFDRSARNLGLKAGGYWPNNQRRELINHQSTVFLFDADTGRVQAAVGGNLLTALRTAAASAVSIKYLARPDAKVLGIVGAGHQSTYQLRAALDQRPFEKVLAWNRTPERLKRLEAAAQEKGLPFKSVTLEQLCRQADVVVTITSSFSPMIAEGLIRPGTHLACMGTDTRGKQEVAPEIVAASTVFTDEVAQSTTIGEAQHAFGMGLLDAAAIVPIGDVINKEHPGRRSAEEITLFDGTGVGIQDLAVASAAVDLAVARGRAVEVEM

SEQ ID NO: 503 - protein, 320 aa, Paracoccus pantotrophus J40; identical to SEQ ID NO: 344

SEQ ID NO: 504 - protein, 321 aa, Marinovum algicola DG 898
MFIVPERDIADLMTREAAFDAVEKVFAAMASGDAYNFPVVREAIGHEDALYGFKGGFDRAGLTLGLKAGGYWPNNLEKRGIINHQSTVFLFDPDTGKAKAMVGGNLLTALRTAAASSVSIKHLARKDAKVIGMVGAGHQAKFQLRAALEQREFEKVIGWNFHPEMLPNLEEVASEAGLPFEAVALEGLTEADVIISITSSFDAILHADHVAPGTHIACMGTDTKGKQEVETALLGKATVFTDEVAQSISIGEAQHAIESQILRAEDITQVGAVINGTHPGRTSDEEITLFDGTGVGLQDLAVAAAVVDLAVAKGLAIEVDF

SEQ ID NO: 505 - protein, 321 aa, Labrenzia alexandrii DFL-11
MIIVPEKEIAALLGRAEAFEAVESVFAAMSSGVAYNFPVIREAIGHADALYGFKSGFDRSSLALGLKSGGYWPGNADKGLTNHQSTVFLFDADTGKAKAVVGGNLLTALRTAAASAVSIKHLARKHAKVLGMIGAGHQSAFQMRAAVEQRSFEKVIGWNLHPEMLSRLEETAAELDLPFEAVDLDRLGAEADVIISITSSFDPILKVSQVTPGTHLACMGTDTKGKQEVEAELVAKATVFTDQVAQSSTIGECQYAVASGLISESDINEIGAVINGNHKGRTSVDEITLFDGTGVGLQDLAVASKVVDLAVEKGIAISVDF

SEQ ID NO: 506 - protein, 321 aa, Methylobacterium sp. 285MFTsu5.1
MIIISEREIATLVSPADCFAAVEGVFASMAKGKAYNFPVVREAIGHADALYGFKSGFDRESLALGLKSGGFWPGNVEKGLTNHQSTIFLFDADTGCCRAIVGGNLLTALRTAASSALSIKYLARPEARVIGMIGAGHQSTFQLSAALDQRRFEKVVGWNIEPSALGRLESVAVERGIPFEAVDLDRLGAEADVIITITSSFAPILKAAQVRPGTHLACMGTDTKGKQEVEAELLAKASVFTDEIAQATSIGEAQHAVAQGLLAATDIVAIGSVINGAHPGRRSPEDITLFDGTGVGLQDLAVASTAVDLAIARGVAREIDF

SEQ ID NO: 507 - protein, 321 aa, Methylobacterium sp. 285MFTsu5.1
MIIVPEHAIDGLLTEAECFTAVEQVFASMARRRAGNFPVVREAIGHADALYGFKSGFDRDSLALGLKAGGFWPGNAAKGLTNHQSTVFLFDADTGRCRAVVGGNLLTALRTAAACAISVRHLARKDARVLGMIGAGHQSAFQLRAALAQRPFERVLAWNLHPGMFGRMEAVAREHGVAFEAVDLDRLGSEADVVVTITSSFAPILKAAQVRPGTHLACMGTDTRGKQEVEAELLAAATVCTDEVAQSVSIGEAQHAVARGLLAADSIVEIGAVINGDHPGRVSESEITLFDGTGVGLQDLAVAAVAVDRAVAKGLATEVDV

SEQ ID NO: 508 - protein, 321 aa, Methylobacterium sp. EUR3 AL-11
MIIVPEHAIDGLLTEAECFTAVEQVFASMARRRAGNFPVVREAIGHADALYGFKSGFDRDSLALGLKAGGFWPGNAAKGLTNHQSTVFLFDADTGRCKAVVGGNLLTALRTAAACAISVRHLARKDARVLGMIGAGHQSAFQLRAALAQRPFERVLAWNLHPGMFGRMEAVARERGVPFEVVDLDRLGAEADVVVTITSSFAPILKAAQVRPGTHVACMGTDTRGKQEVEAELLAAATVFTDEVAQSVSLGEAQHAVARGLLAADSIVEIGAVINGDHPGRVSDAEITVFDGTGVGLQDLAVAAVAVDRAVAKGLATEVDF

SEQ ID NO: 509 - protein, 320 aa, Paracoccus yeei ATCC BAA-599
MLVVAEKEIGGLMTPEAAFEAIEAVFAAMDAGKAYNFPVVREAIGHEDALYGFKGGFDASALTLGLKAGGYWPNNQKHDLINHQSTIFLFDADTGRVAAAVGGNLLTALRTAAASAVSIKYLAPKGARVLGMIGAGHQSAFQMRAAARVHAFEKVIGWNPHPEMLTRLAETAAELGLPFEAVDLDRLGAEADVIVSITSSFSPLLMNEHVRGETHIAAMGTDTKGKQELDPALVARAKLYTDEVAQAVSIGECQHAVAQGLVEAAAITRLGAAVNGTDPGRDGAEITLFDGTGVGLQDLAVAAKVVQLAQAKGIAQTVEI

SEQ ID NO: 510 - protein, 321 aa, Defluviimonas sp. 20V17; identical to SEQ ID NO: 326

SEQ ID NO: 511 - protein, 321 aa, Sphingomonas sp. DC-6
MIIVPEREIAGLISASDCFTAVEQVFASMAKKSAYNFPVIREAIGHADALYGFKSGFDRESLALGLKSGGFWPNNMAKGLTNHQSTVFLFDADTGKCKAVVGGNLLTALRTAAASAVSIKYLARPDSKVLGMIGAGHQSTFQLRAALEQRPFEKVIGWNLHREALSRLEAVAAEKGLPFEAVDLDRLGAEADVIITITSSFDPILEAAQVRPGAHLACMGTDTKGKQEVDAELVAASTVFTDEIAQSITIGEAQHAVAEGLIAAESIIEIGAVINGSHPGRTSEREITLFDGTGVGLQDLAVASAAADLAVSKGVAIEVDF

SEQ ID NO: 512 - protein, 332 aa, AP Rhodobacteraceae bacterium bin18
MADGASAPANELVIVPEGMIPDILTREASFDAVEKVFAAMAAGEARNFPVVREAIGHEDALYGFKGGFDAVGGVLGLKAGGYWPHNLDRRGIINHQSTVFLFDPDTGRVKALVGGNYLTALRTAAASSVSIRHLARKDAKVLGMIGAGHQAKFQLRAAAETHAFEKVIGWNLHPEMLPGLAEVAREVGLPFEAVELPGMSEADVIITITSSFAPTLLADHVSPGTHLACMGTDTKGKQEVEAALLGRARVFCDEVAQSVSIGEAQHAVAEGLLSEGDVTQLGAVINGTHGGRGSDEEITLFDGTGVGLQDLAVADAIVKTAVAQGIATIVPL

SEQ ID NO: 513 - protein, 320 aa, Paracoccus sulfuroxidans CGMCC 1.5364
MYVVPEKEIAGLMTPDAAFEAIEAVFASMARRKAYNFPVVREAIGYEDALYGFKGGFDAAGLSLGLKAGGYWPNNQKHNLINHQSTVFLFDPDTGRVSAAVGGNLLTALRTAAASAVSIKYLAPKGAKVLGMIGAGHQSAFQMRAAARVHNFEKVIGWNPHPEMLTRLADTAAELGLPFEAVELDRLGSEADVIISITSAFSPLLMDSHVKGPTHIAAMGTDTKGKQELDAALVARARVFTDEVAQSISIGEAQHAIAQGLIAEEAINELGAVVTGDHEGRGDAEVTIFDGTGVGLQDLAVAHKSVEIAKQKGVALTVEI

SEQ ID NO: 514 - protein, 330 aa, Marinobacterium sp. AK27
MSTSVNGAGVAIVSEAVCEQIVGRPEAFKAVESVFGAMARGDAYNFPVVREAIGHADALYGFKSGFDRAGMVLGVKSGGYWPGNVQKDLTNHQSTVILFDPDTGRLKALVGGNYLTAVRTAAASAVSIAYLARKDAKVLGMVGAGHQSTFQLRAALEQRAFEKVVAWNPHPEYLSRLAAVCDELRVPFEAVDQQQLGAQADVIITITSAFEPLMMKEWIKPGTHIACMGTDTKGKQEVDPELLAAATLFTDEVAQSISIGEAQHAVASGLISESDITPIGEVINGTHPGRRDDQEITLFDGTGVGLQDLAVASAAANLALEQGLALRIAL

SEQ ID NO: 515 - protein, 321 aa, Yangia pacifica DSM 26894
MLIVPEREIADLMTREAAFAAVEKVFAAMAAGDAYNFPVVREAIGHEDALYGFKGGFDRSGLTLGLKAGGYWPNNLEKRGIINHQSTVFLFDPDTGKARAMVGGNLLTALRTAAASSVSIRHLAREDARVIGMVGAGHQATFQLRAALEQRDFDKVIGWNLHPEMLPNLEKVAAEAGVPFEAVELTGMREADVIISITSSFDAILMAEHVSPGCHIACMGTDTKGKQEVSPALLAKATVFTDEVAQSVSIGEAQHAVAQGLIDESAITQLGAVINGAHPGRRSAEEITLFDGTGVGLQDLAVAAAVVDLAVEKGIAIEVDF

SEQ ID NO: 516 - protein, 321 aa, Shimia haliotis DSM 28453
MLIVPEREIADLMTRDAAFDAVEKVFAAMASGDAYNFPVVREAIGHEDALYGFKGGFDQAGLTLGLKAGGYWPNNLEKRGLINHQSTVFLFDPDTGKAKAMVGGNLLTALRTAAASSVSIKHLARSDSKVIGMVGAGHQATFQLRAALEQRNFEKVIGWNYHPEMLPNIEKVANEAGLPFEAVDLPGLTEADVIISITSAFAPSVMAEHISEGTHIACMGTDTKGKQEVEAALLVKADVFTDEVAQSISIGEAQHAVAQGLIKETDVAQLGAVINGTIAGRTSDDQITLFDGTGVGLQDLAVAASVVDLAVEKGIAIEVDF

SEQ ID NO: 517 - protein, 322 aa, Hasllibacter halocynthiae DSM 29318
MIIVPEAAIADLVDRAAAFDAVEATFAAMASGDARNFPVVREALPGPEEALYGFKGGVDASAEALGLKAGGYWPHNLERRGLINHQSTVFLFDPETGRPTAMVGGNLLTALRTAAASSVSIRHLAREDARVIGMVGAGHQAGFQLRAALEQRPFEKVIGWNLHPEMLPNLEKVAAEAGLPFEAVELEGLRAADVIVTITSSFAPTLMAGHVGPGAHVACMGTDTVGKQEVDPELLKLATVFADEVAQSVTLGEAQHAVGAGTIAEGDLTPIGDVIRGVHPGRTSQEEITLFDGTGVGLQDLAVAAAAVRLAQEKGVAVEVEI

SEQ ID NO: 518 - protein, 321 aa, Oceanicola nitratireducens DSM 29619; identical to SEQ ID NO: 403

SEQ ID NO: 519 - protein, 321 aa, Ruegeria halocynthiae DSM 27839
MIIVPEKEIGALLGRKESYEAIEQVFAAMASGNAYNFPVVREAIGHADALYGFKGGFDQAGMTLGLKAGGYWPNNLETHGLINHQSTVFLFDPDTGRVKAVVGGNLLTALRTAAASSVSINYLARKDAKVIGMVGAGHQAKFQLRAALEQRNFEKVIGWNLHPEMLPNLEEVAAEAGLPFEAVELSGMTEADVIITITSSFAPTLMSDHVSDGTHIACMGTDTIGKQEVGVDLIARASVFADEIAQSITLGECQHAIANGSKAEADIRQVGEVINSTHQGRTSDDEVTLFDGTGVGLQDLAVASAVVDLAVEQGIAIKVDF

SEQ ID NO: 520 - protein, 334 aa, Citreimonas salinaria DSM 26880
MNAPDKTATAANMVTIVPESEIGGLMDAASAFDAVEATFAAMARGDAYNFPVIREAIGHADALYGFKSGFDKAALALGLKSGGYWPGNEARGLTNHQSTVILFDADTGRVKALVGGNLLTALRTAAASAVSIAHLSRKDSKVLGMVGAGHQSAFQMRAACAQRDFDKVVGWNYHPEMLSRLEDTAKELGLPFEAVEREDLCAQADVIITITSSHDAQLMADWVKPGTHVACMGTDTKGKQEVDPALLARASVFTDEVAQSVTLGEAQHAVAQGLIKEADITPIGAVIEGTAKGRTSDDQVTLFDGTGVGLQDLAVAAKVVDLALKAGKAQQVPF

SEQ ID NO: 521 - protein, 321 aa, Ruegeria mobilis S1942
MYIVPERAIADLMTRDAAFDAVEKIFAAMAAGDAYNFPVVREAIGHEDALYGFKGGFDSAGLSLGLKAGGYWPNNLEKRGLINHQSTVFLFDPDTGKVRAMVGGNLLTALRTAAASSVSIKHLAREDAKVIGMIGAGHQAKFQLRAALEQRDFDKVIGWNLHPEMLPNLKEVATEAGLPFEAVELDGLKEADVIISITSSFDAILKADQVSPGTHIACMGTDTKGKQEVDPQLLVRATVFTDEVAQSISIGEAQHAVAQGLITEADVAQLGAVINGAHPGRSSAEQITLFDGTGVGLQDLAVAASVVELAVKKGVAIEVDF

SEQ ID NO: 522 - protein, 321 aa, Leisingera aquaemixtae CECT 8399
MYIVPEKAVADLVTREASFDAVEKVFAAMASGDAYNFPVVREAIGHEDALYGFKGGFDRAGLTLGLKAGGYWPNNLEKRGLINHQSTVFLFDPDTGKVKAMVGGNLLTALRTAAASSVSIKHLARQDAKVIGMIGAGHQAKFQLRAALEQRNFEKVIGWNFHPDMLPNIEKVAAEAGVPFEAVDLPGMRDADVIISITSAFAPSLMADHVSPGTHVACMGTDTKGKQEVEAALLVKSTVFTDEVAQSITIGEAQHAVAQGLIQESDVAQLGAVINGTNPGRTSDDQITLFDGTGVGLQDLAVAASVVEVAVEKGIAIEVDF

SEQ ID NO: 523 - protein, 321 aa, Leisingera aquaemixtae CECT 8399; identical to SEQ ID NO: 522

SEQ ID NO: 524 - protein, 320 aa, Paracoccus halophilus JCM 14014; identical to SEQ ID NO: 397

SEQ ID NO: 525 - protein, 321 aa, Ruegeria sp. ZGT118
MLIVPEREIADLMTREAAFDAVEQVFASMASGDAYNFPVVREAIGHEDALYGFKGGFDRAGLTLGLKAGGYWPNNLEKHGLINHQSTVFLFDPDTGRPTAMVGGNLLTALRTAAASSVSIKHLARTDAKILGMIGAGHQAAFQLRAALEQRNFEKVIGWNYHPEMLPNIEKVAAEAGIPFEAVPLDGMRQADVIISITSAFAPSLMADHVSAGTHVACMGTDTKGKQEVESALLAGAGVFTDEVAQSVTIGEAQHAVAEGLIKESDVAQLGAVINGTHPGRSSDDQITLFDGTGVGLQDLAVAASVVELAVRKGIAIEVDF

SEQ ID NO: 526 - protein, 326 aa, Ruegeria faecimaris DSM 28009
MKSDGLLIVGEDLCEKLVGRQQAFDAVQAVFGAMAKGGAWNFPVIREALGHADVLYGFKSGFDRDGQVLGLKSGGYWPGNAAKGLTNHQSTVFLFDPDTGRLSALVGGNYLTAVRTAASSAVSIAHLARQDARVLGMVGAGHQSTFQLRAAAEQRDFEKVIAWNPHPDMLPRLAAVATEVGLEFEAVSQQELGAQADVIITITSAFEPLLMKDWIKPGTHLACMGTDTKGKQEVDADLVAAATVFTDEVAQSVTIGEAQHAINLGALTEDAIAPIGAVINGDHPGRTSDDQITLFDGTGVGLQDLAVASVAARLAEEADLAQRATL

SEQ ID NO: 527 - protein, 321 aa, Shimia sagamensis DSM 29734
MLIVPEREIADLMTREAAFDAVEKVFAAMAARDAYNFPVVREAIGHEDALYGFKGGFDQAGLTLGLKAGGYWPNNLEKRDLINHQSTVFLFDPDTGKAKAMVGGNLLTALRTAAASSVSIKHLARDDAKVIGMIGAGHQATFQLRAALEQRQFEKVIGWNYHPEMLPNIEKVATEAGLPFEAVKLDGMKEADVIISITSAFAPSLMADHVAPGTHIACMGTDTKGKQEVESALLAKASVFTDEVAQSISIGEAQHAVAEGLIKESDVGEIGAVINGTNPGRTSADQITLFDGTGVGLQDLAVAAAVVDLAVEKGIAIEVDF

SEQ ID NO: 528 - protein, 321 aa, Sulfitobacter sp. HI0027; identical to SEQ ID NO: 494

SEQ ID NO: 529 - protein, 333 aa, Psychrobacter cryohalolentis K5
MSEANSVNSDEGLLIVSEDACKSVIDRPSAFIAVENVFASMSRGDAYNFPVIREAIGYADALYGFKSGFDRAGKSLGLKSGGYWPGNAAKGLTNHQSTIFLFNPDNGKLRALVGGNYLTAVRTAAASAVSIAHLARKDSKVLGMVGAGHQSTFQLRAALEQRNFEKVVAWNKNKDRLKNLQAVAEELGVPFEAVEREQLCSEADVIITITSAFEPLLMKEWIKPGTHIACMGTDTVGKQEVDVNLIAAATVFTDEITQSISLGETQHAIKSGAIKESDITTLGDVINGEHPGRSSDDEITLFDGTGVGLQDLAVASAATKLALEKGEAQHISL

SEQ ID NO: 530 - protein, 321 aa, Rhodobacterales bacterium Y4I scf_1106129324775 genomic scaffold
MYIVPEKAVADLVTREASFDAVEKVFAAMASGDAYNFPVVREAIGHEDALYGFKGGFDRAGLTLGLKAGGYWPNNLEKRGLINHQSTVFLFDPDTGKVKAMVGGNLLTALRTAAASSVSIKHLARQDAKVIGMIGAGHQATFQLRAALEQRPFEKVIGWNYHPEMLPNIEKVAAEAGVPFEAVDLPGMADADVIISITSAFAPSLMADHVSPGTHIACMGTDTKGKQEVEAELLVKATVFTDEVAQSISIGEAQHAVAQGLIQESDVAQIGAVINGTNPGRTSDDQITLFDGTGVGLQDLAVAASVVEVAVEKGIAIEVDF

SEQ ID NO: 531 - protein, 330 aa, Colwellia sp MT41
MSDSQINKGVSVISEEVCQQVMGRANAFTAVENVFSAMAKKTAYNFPVIREAIGHADALYGFKSGFDRDGMVLGLKSGGYWPSNMAKGLTNHQSTVILFDPDTGKLKSLVGGNYLTAVRTAASSAISIAYLARKDAKVLGMIGAGHQSTFQLRAAVEQRNFEKVVCWNLHPEHISNLAAVAEELGLPFESVTREELCAQADVIITITSAFEALIEKDWIKPGTHIACMGTDTKGKQEVDAKLLTVAKVFTDELAQSITIGEAQHAIARKLIQQSDIVPIGEVINGTKPGRTSAEDITLFDGTGVGLQDLAVASLAAELAEAKGLATYFKL

SEQ ID NO: 532 - protein, 321 aa, cNanh_4411
MIIVPEREIANLMTREAAFVAVEQVFAAMAAQDAYNFPVIREAIGHEDALYGFKGGFDRAGKTLGLKAGGYWPNNLDKHQIINHQSTVFLFDPDTGKAKAMVGGNLLTALRTAAASSVSIKHLARKDARVIGMIGAGHQATFQLRAALEQRQFEKVIGWNFHPEMLPNLEKVADEAGLPFQAVDLNGLRDADVLISITSSFEAILQADQVSPGTHIACMGTDTKGKQEVDPALLTRATVFSDEVAQSISIGEAQHAIAMELITEHDITQIGAVINGTHPGRTSDDQITLFDGTGVGLQDLAVAASVVDLAVANGVAIEVDF

SEQ ID NO: 533 - protein, 321 aa, Methylobacterium mesophilicum SR1.6/6
MIIVPEHAIDGLLTEAECFGAVEQVFASMARRRAGNFPVVREAIGHADALYGFKSGFDRDSLALGLKAGGFWPGNAAKGLTNHQSTVFLFDADTGRCKAVVGGNLLTALRTAAACAISVRHLAREDARVLGMIGAGHQSAFQLRAALAQRPFDRVLAWNLHPGMFGRMEAVAREHGVPFEAVELDRLGAEADVIVTITSSFAAILKAAQVRPGTHVACMGTDTRGKQEVEAELLAAATVFTDEVAQSVSIGEAQHAVARGLLAADSIVEIGAVINGDHPGRISESEITVFDGTGVGLQDLAVAAVAVDRAVAKGLATEVDF

SEQ ID NO: 534 - protein, 321 aa, Methylobacterium sp. B34; identical to SEQ ID NO: 507

SEQ ID NO: 535 - protein, 321 aa, Roseivivax halodurans JCM 10272
MIIVPEKDIADLMTREAAFAAVEQVFAAMASGDAYNFPVVREAIGHADALYGFKGGFDRLGGVLGLKAGGYWPHNLETHGIINHQSTVFLFDPDTGRVAAMVGGNLLTALRTAAASSVSIRHLAREDAEVLGMIGAGHQAAFQLRAALEHRSFGKVVGWNYHPEMLPNLEKVAAEAGVAFEAVDLPGMREADVIVTITSSFDATLMAEHVAPGTHVACMGTDTKGKQEVDPALLAAATVFADEIAQSVSIGEAQHAVSAGLISESDIAELGAVINGSHPGRRSDEEITLFDGTGVGLQDLAVAAAVVALARANDTAIEVEV

SEQ ID NO: 536 - protein, 338 aa, Pelagicola litoralis DSM 18290
MAAGIGCAAVAYFKELLMIIVPEHEISGLMTRQDSFDAVEKVFASMASGAAYNFPVIREAIGHADALYGFKSGFDRAGLNLGLKSGGYWPGNADKGLTNHQSTVFLFDADTGKCRAIVGGNLLTALRTAAASAVSIKYLAPKSAKVLGMIGAGHQSSFQLRAALDQRAFEKVIGWNLHPEHLSRLEDVATEAGLPFEAVELDQLGQEADTIITITSSFAPILKNAHVTGGTHIACMGTDTVGKQEVDAELVARAQVFTDEVAQSISLGECQHAMSAGLIRQEQIAQIGDVINGTHTGRTSENDITLFDGTGVGLQDLAVASAVVELAVARGVAIEVDF

SEQ ID NO: 537 - protein, 331 aa, Thalassobacter stenotrophicus DSM 16310
MDGSPMKSHEIIIVPEAEIAGLMTPEAAFDAVEAIFGAMARKDAYNFPVIREAIGHADALYGFKSGFDRAGGALGLKSGGYWPGNEAKGLTNHQSTVILFDRDTGRPKAMVGGNLLTALRTAAASAVSIKHLARADSKVLGMIGAGHQSAFQMRAALAQRPFEKVIGWNYHPEMLSRLEAVATEAGLPFEAVDLDRLGAEADVIISITSSFDAILHDAQVTAGTHVACMGTDTKGKQEVEAALVARATVFTDEIAQSTTIGEAQHAIASGLITEAAITEIGAVINGTHPGRTSAEEVTLFDGTGVGLQDLAVAEAVVDLALKTGVATRVPF

SEQ ID NO: 538 - protein, 321 aa, Methylobacterium sp. UNC300MFChir4.1
MIIVPEHAIDGLLTEAECFTAVEQVFASMARRRAGNFPVVREAIGHADALYGFKSGFDRDSLALGLKAGGFWPGNAAKGLTNHQSTVFLFDADTGRCRAVVGGNLLTALRTAAACAISVRHLARKDARVLGMIGAGHQSAFQLRAALAQRPFERVLAWNLHPGMFGRMEAVARERGVPFEAVDLDRLGAEADVVVTITSSFAPILKAAQVRPGTHVACMGTDTRGKQEVEAALLAAATVFTDEVAQSVSIGEAQHAVARGLLAADSIVEIGAVINGDHPGRVSESEITLFDGTGVGLQDLAVAAVAVDRAVAKGLATEVDV

SEQ ID NO: 539 - protein, 320 aa, Paracoccus pantotrophus DSM 1403
MLVVAEKEIAGLMTPEAAFEAIEAIFASMARRKAYNFPVVREAIGHEDALYGFKGGFDASALVLGLKAGGYWPNNQKHNLINHQSTVFLFDPDTGRATAAVGGNLLTALRTAAASAVSIKYLAPKGAKVLGMIGAGHQSAFQMRAVANVHPFEKVIGWNPHPEMLSRLADTAAELGLPFEAVELDRLGTEADVIISITSSFSPLLMDQHVKGPTHIAAMGTDTKGKQELDPALVARARIFTDEVAQSVSIGECQHAIASGLIREDQIGELGAVVAGDHPGRGDAEVTLFDGTGVGLQDLAVAQKVLEIAKEKGLAQEVEI

SEQ ID NO: 540 - protein, 321 aa, Rhizobium lusitanum P1-7; identical to SEQ ID NO: 394

SEQ ID NO: 541 - protein, 333 aa, Paracoccus alkenifer DSM 11593
MIIVPEHAIAGLVSASDCLEAVEQVFAAMARRSARNFPVIREALGHADALYGFKSGFDRESLALGLKSGGFWPGNISRGLTNHQSTVFLFDADTGACRAVVGGNLLTALRTAAASAISIKHLARPDARVLGMIGAGHQSSFQLRAALAQRHFEKVVGWNLHQPDLARLNAVATELGVPFEAVDLDRLGAEADVIITITSSFDPILMAAQVRPGTHLACMGTDTAGKQEVEPALVAAATVFTDEITQSITLGEAQHAAAQGLLAAAQITELGAVINGTHPGRTSAQEITLFDGTGVGLQDLAVASVAVDRALDKGVAITVDFQSPIGPAGATSP

SEQ ID NO: 542 - protein, 321 aa, Loktanella koreensis DSM 17925
MIIVPEKEIAGLMTREAAFDAVEAVFAAMSKGSAYNFPVIREAIGHADALYGFKSGFDRESLALGLKSGGFWPGNDAKGLTNHQSTIFLFDADTGQCRALVGGNLLTALRTAAASSVSIKHLARADAKVLGMIGAGHQSTFQMRAALEQRDFEKVIGWNYHPDMLSRLSDLADELGIPFEAVDLERMGQEADVIISITSAFAPSLMDAHISHGTHIACMGTDTKGKQEVETALLGRAKVFTDEIAQSVSIGEAQHAIAAGLLTADQITEIGSVINGDSPGRTSADDITLFDGTGVGLQDLAVASTVVDLAVAQGVAIEIEF

SEQ ID NO: 543 - protein, 321 aa, Methylobacterium sp. 190MF
MIIVSEREIATLVSPADCFAAVEGVFASMAKGKAYNFPVVREAIGHADALYGFKSGFDRESLALGLKSGGFWPGNVEKGLTNHQSTIFLFDADTGCCRAIVGGNLLTALRTAASSALSIKYLARPEARVIGMIGAGHQSTFQLSAALDQRRFEKVVGWNIEPSALGRLESVAVERGIPFEAVDLDRLGAEADVIITITSSFAPILKAAQVRPGTHLACMGTDTKGKQEVEAELLAKASVFTDEIAQATSIGEAQHAVAQGLLAATDIVAIGSVINGAHPGRRSPEDITLFDGTGVGLQDLAVASTAVDLAIARGVAREIDF

SEQ ID NO: 544 - protein, 321 aa, Methylobacterium sp. 190MF; identical to SEQ ID NO: 507

SEQ ID NO: 545 - protein, 332 aa, Ruegeria sp. ANG-S4
MRDEMNTQTDGLLIVDEDACEQLVGRQQAFDAVQDVFAAMARGDARNFPVVREALGHADAIYGFKSGFDRSGQVLGVKSGGYWPGNSQKGLTNHQSTVVLFDPDTGRITALVGGNYMTAVRTAASSAISIAHLARPDAQILGMVGAGHQSTFQLRAAAEQREFEKVVAWNPHPEMLPRLAEVAEDLGLEFEATTPEGLGAQADVIITITSAFEPLLKKDWVKPGTHLACMGTDTKGKMEVDPALVAAATLFTDEVAQSISIGEAQHAALKGEISQDAITPIGAVINGDHIGRSNDAEITLFDGTGVGLQDLAVASVAAQLAKNTGLANKVTL

SEQ ID NO: 546 - protein, 321 aa, Leisingera nanhaiensis CGMCC 1.10959; identical to SEQ ID NO: 532

SEQ ID NO: 547 - protein, 331 aa, Loktanella rosea DSM 29591
MSGRKRKTKTMIIVPEKEIAGLLTRADAFEAVEKVFASMSKGSAYNFPVIREAIGYEDALYGFKGGFDKAGMALGLKAGGYWPNNLEKHGEINHQSTVFLFDPDTGKVKAMVGGNLLTALRTAAASSVSIKHLARKDAKVMGMVGAGHQATFQLRAALEQRDFEKVIGWNYHPEMLPNIERVANEAGLPFEAVPLEGLAEADVVISITSTFAPTIMADHIAPGTHIACMGTDTKGKQEVEASLLARATVFTDEVAQSISIGEAQHAIASGLIEQSDVHELGAVINGTHPGRTSADEITLFDGTGVGLQDLAVASSIVDLAVEKGVATIVDF

SEQ ID NO: 548 - protein, 321 aa, Poseidonocella pacifica DSM 29316
MIIVPENKIGDLMTRADSFAAVEKVFASMAKGSAYNFPVIREAIGHADALYGFKSGFDRSELVLGLKSGGFWPGNMEKGLTNHQSTVFLFDADTGKCKAVVGGNLLTALRTAAASAVSIKYLAPKGAKVLGMIGAGHQSAFQMRAAAEQRDFEKVIGWNVDPAMLSRLEETAAEIGLPFEAVDLDRLGAEADTIITITSSFDAILMDAQVTGGTHIACMGTDTKGKQEVDAALVGRATVFTDEVAQSISIGEAQHAVANGVLKEADIAQIGAVINGDHPGRTSDDELTLFDGTGVGLQDLAVADAVVKRAVEAGVAVEVDF

SEQ ID NO: 549 - protein, 321 aa, Leisingera sp. ANG-S5
MYIVPEKAIADLVTREASFDAVEKVFAAMAAGDAYNFPVVREAIGHEDALYGFKGGFDRAGLTLGLKAGGYWPNNLEKRGLINHQSTVFLFDPDTGKVKAMVGGNLLTALRTAAASSVSIKHLARQDAKVIGMIGAGHQATFQLRAALEQRQFEKVIGWNYHPEMLPNIEKVAAEAGLPFEAVDLPGMTEADVIISITSAFAPSLMADHVSPGTHIACMGTDTKGKQEVEAELLVKASVFTDEVAQSISIGEAQHAVAQGLIQESDVAQIGAVINGTNPGRTSDDQITLFDGTGVGLQDLAVAASVVEVAVEKGIAIEVDF

SEQ ID NO: 550 - protein, 321 aa, Cribrihabitans marinus DSM 29340
MLIVPEREIADLMTREAAFDAVEKVFAAMASGDAYNFPVVREAIGHEDALYGFKGGFDRAGLTLGLKAGGYWPNNLDKRGIINHQSTVFLFDPDTGMVKAMVGGNLLTALRTAAASSVSIRHLARKDARVIGMIGAGHQARFQLRAALEQRDFEKVIGWNFHPEMLPNLQEVAEAAGLPFEAVELDGMREADVIVSITSSFDAILGADQVSPGTHVACMGTDTKGKKEVDPQLLVRADVFTDEVAQSVSIGEAQHAVGRGLISEADVAQLGAVINGSHAGRSSDDQITLFDGTGVGLQDLAVAAAVVDLAVERGIAIEVDF

SEQ ID NO: 551 - protein, 321 aa, Ruegeria mobilis DSM 23403
MYIVPERAIADLMTRDAAFDAVEKVFAAMAAGDAYNFPVVREAIGHEDALYGFKGGFDRAGLSLGLKAGGYWPNNLEKRGLINHQSTVFLFDPDTGKVRAMVGGNLLTALRTAAASSVSIKHLAREDAKVIGMIGAGHQAKFQLRAALEQRDFDKVIGWNLHPEMLLNLEEVATEAGLPFEAVELDGMRAADVIISITSSFDAILKADQVSPGTHIACMGTDTKGKQEVDPQLLVRATVFTDEVAQSTSIGEAQHAVAQGLIGEADVAQLGAVINGAHPGRTSAEQITLFDGTGVGLQDLAVAASVVELAVKKGIAIEVDF

SEQ ID NO: 552 - protein, 321 aa, Pseudopelagicola gijangensis DSM 100564
MWIVPEREIAGLMTREAAFGAVEKVFSSMASGDAHNFPVIREAIGHEEALYGFKGGFDRAGAALGLKAGGYWPHNLEKRGLINHQSTVFLFDPDTGKASAMVGGNLLTALRTAAASSVSIKHLARSDAKVIGMVGAGHQATFQLRAALEQRNFDKVIGWNLHPEMLPNLEKVATQAGLPFEAVELDGLHEADVIITITSSFEASLMSHHVSDGTHIACMGTDTVGKQEVEPALIERASVFTDEVAQAISLGESQHAVCAGTKAESDINEIGAVINGTHRGRKSDDEVTLFDGTGVGLQDLAVAASVVDLAIAKGVAIEVDF

SEQ ID NO: 553 - protein, 327 aa, Ruegeria atlantica CECT 4293
MTTQDGLLIVGEDLCEQLVGRQQAFDAVQSVFGAMANGGARNFPVVREALGYADALYGFKSGFDRDGQVLGVKSGGYWPGNAEQGLTNHQSTVFLFDPDTGRLSALVGGNYLTAVRTAASSAVSIAQLARKDAKVLGMVGAGHQSAFQLRAAAEQRDFEKVVAWNPHPDMLPRLAAVAEEIGLEFEAVSQQELGAQSDVIITITSAFEPLLMKDWIKPGTHLACMGTDTKGKMEVDPALVASATVFTDEVAQSATIGEAQHAMGSGTLTETQITPIGAVINGDHPGRSSADEITLFDGTGVGLQDLAVASVAARLADEAGLAQRATL

SEQ ID NO: 554 - protein, 331 aa, Thalassobacter stenotrophicus CECT 5294; identical to SEQ ID NO: 537

SEQ ID NO: 555 - protein, 321 aa, Loktanella sediminilitoris DSM 29955
MLIVPEREIADLMTRDAAFDAVEKVFAAMAAGDAYNFPVVREAIGHEDALYGFKGGFDQAGLTLGLKAGGYWPHNLEKRGIINHQSTVFLFDPDTGKAKAMVGGNLLTALRTAAASSVSIKHLARDDASVIGMIGAGHQATFQLRAALEQRQFEKVIGWNYHPDMLPNIEKVATEAGLPFEAVELEGMVDADVIISITSAFAPSLMADHVSPGTHIACMGTDTKGKQEVEAALLARAAVFTDEVAQSISIGEAQHAIGAGLIAETDINQLGAVINGTHAGRTSDDQITLFDGTGVGLQDLAVAAAVVDLAVQKGIAIEVDF

SEQ ID NO: 556 - protein, 321 aa, Rhizobium taibaishanense DSM 100021T
MLIVPEREIANLITAADCFTAVERVFASMANKAAYNFPVIREAIGHADALYGFKSGFDRESLALGLKAGGFWPNNVSKGLTNHQSTIFLFDADTGKCRAAVGGNLITALRTAAASAVSIKYLARQEAKVLGMIGAGHQSAFQLRAALQQRQFEKVVAWNFHPEMLSRLEQVANDEGLPFEVLDLERLGAESDVIISITSSFAPLLKASQVRPGTHVACMGTDTKGKQEVEPELVAMATVFTDEIAQAVTIGECQHAVERGITNKEAIIEIGAVISGKHPGRSSADEITLFDGTGIALQDLAVASVAVELALVKGVAIEIDF

SEQ ID NO: 557 - protein, 321 aa, Rhodobacteraceae bacterium JGI 01_L11_4000m
MLIVPEREIADLMTRAAAFDAIEKVFAAMASGDAYNFPVVREAIGHEDALYGFKGGFDRAGLTLGLKAGGYWPNNLEKRGLINHQSTVFLFDPDSGKVKAMVGGNLLTALRTAAASSVSIKHLARKDASVLGMVGAGHQATFQLRAALEQRNFEKVIGWNYHPEMLPNIEKVAQEAGVPFEAVDLPAMTEADVIISITSAFAPSLMADHVSPGTHVACMGTDTKGKQEVEAALLGRAAVFTDEVAQSVSIGEAQHAIAEGIITETDVAQLGAVINGDHPGRISKDQITLFDGTGVGLQDLAVAAKVVDLAVEKGIAVEVDF

SEQ ID NO: 558 - protein, 321 aa, Sulfitobacter sp. HI0054; identical to SEQ ID NO: 557

SEQ ID NO: 559 - protein, 321 aa, Labrenzia aggregata CECT 4801
MIIVPEKEIAGLIGRQESFDAVESVFAAMAGGAAYNFPVIREAIGHADALYGFKSGFDRSSLALGLKSGGYWPGNMAKGLTNHQSTVFLFDADTGKAKAVVGGNLLTALRTAAASAVSIKHLARKDAKVLGMIGAGHQSAFQMRAAVEQRDFEKVLGWNLHPEMLVRLEETANELGLPYESVDLARLGAEADVIISITSSFDPILMEEHVSPGTHIACMGTDTKGKQEVDVALVAKAKLFTDEIAQSATIGECQHAVASGIVSEDNIIEIGAVINGNHPGRTSQSDITLFDGTGVGLQDLAVASAAVDLAIQKGVAIEVDF

SEQ ID NO: 560 - protein, 321 aa, Roseovarius nubinhibens ISM
MLIVPERQIPDLLTRSASFTAVEKVFAAMAAGQAYNFPVIREAIGHEDALYGFKGGFDRDGHTLGLKAGGYWPHNLEKRGLINHQSTVFLFDPDSGMISAMVGGNYMTALRTAAASAVSIQHLARPDAKVIGMIGAGHQATFQLRAALEQRPFEKVIGWNLHPEMLPNLAAVAEEAGLPFEAVELDGMTEADVIITITSSFAPSLLAQHVSPGTHIACMGTDTKGKQELEAALLGSATVFADEIDQSITLGEAQHAIATGLISRDDITEIGAVINGTHPGRSSAEEITLFDGTGVGLQDLAVAAAVVDLAVEQGVAIEVDF

SEQ ID NO: 561 - protein, 321 aa, Roseobacter sp. SK209-2-6
MYIVPEREIAGLMTREASFAAVEKVFAAMAAKDAYNFPVIREAIGHEDALYGFKGGFDRAGQTLGLKAGGYWPNNLEKRGLINHQSTVFLFDPDTGKASAMVGGNLLTALRTAAASSVSISHLARKDAKVIGMIGAGHQAKFQLRAALEQREFEKVIGWNLHPEMLPNLQEVADEAGLPFEAVELDGMREADVIISITSSFDAILGADQVSPGTHLACMGTDTKGKQEVDPALLVKATVFTDEVAQSISIGEAQHAIAQGLIGEGDIAQLGAVINKAHPGRQSDEEVTLFDGTGVGLQDLAVASAVVDQAVKTGIAIEVDF

SEQ ID NO: 562 - protein, 321 aa, Rhodobacterales bacterium HTCC2083 scf_1106200183017
MWIVPEREIADLLTRDASFEAVENVFAAMAAGDAYNFPVIREAIGHEDALYGFKGGFDGVGGTLGLKAGGYWPHNLEKRGLINHQSTVFLFDPDTGKVAAMVGGNYLTALRTAAASSVSIKHLARADAKVMGMVGAGHQATFQLRAALEQRAFEKVIGWNYHPEMLPNIEKVANEAGVPFEAVELDGLGEADVVISITSTFAPTIMAEHISAGTHIACMGTDTKGKQEVEAALLARASVFTDEVAQSVSIGEAQHAIAERLIAVSDVTQIGAVINGTHEGRTSEEEITLFDGTGVGLQDLAVSAAIVRMAIEQGVAIEVDF

SEQ ID NO: 563 - protein, 321 aa, Agrobacterium sp. ATCC 31749 AGT22
MIIVPEHEIESLVSASDCFTAVERVFASMAQKSAYNFPVIREAIGHADALYGFKSGFDRESLALGLKSGGFWPNNIEKGLTNHQSTIFLFDADTGKCRAVVGGNLLTALRTAAASAVSIKYLARPDAKVLGMVGAGHQSTFQLRAALEQRAFEKVVGWNIYPEALDRLAKIAAEHDVPFEAVDLDRLGAEADVIITITSAFAPILKAAQIRRGTHLACMGTDTKGKQEVEAELLAAATIFSDEIAQSVTIGEAQHPVARGLISPDRITEIGAVINGAHPGRTNADEITVFDGTGVGLQDLAVASKAVDLAVQKGVAVVVDF

SEQ ID NO: 564 - protein, 320 aa, Paracoccus sp. TRP Paracoccus_TRP_Contig_10
MYVVAEKEIAGLMNPEAAFEAIEAVFAAMARRKAYNFPVVREAIGYEDALYGFKGGFDASGLALGLKAGGYWPNNQKHGLINHQSTVFLFDPDTGRVSAAVGGNLLTALRTAAASAVSIKYLAPIGAKVLGMIGAGHQSAFQMRAAANVHGFEKVIGWNPHPEMLSRLADTAAELGLPFEAVDLPQLGEEADVIISITSSFSPLLLNEHVKGPTHIAAMGTDTKGKQELDPALVTRARIFTDEVAQSISIGECQHAIAAGLIKEEQISELGAVVTGDNPGRADAEVTLFDGTGVGLQDLAVAQKVLEIAKEKGIAQQVEI

SEQ ID NO: 565 - protein, 321 aa, pAqui_F126
MYIVPEKAIADLVTREASFDAVEKVFAAMAAGDAYNFPVVREAIGHEDALYGFKGGFDRAGLTLGLKAGGYWPNNLEKRGLINHQSTVFLFDPDTGKVKAMVGGNLLTALRTAAASSVSIKHLARQDAKVIGMIGAGHQAKFQLRAALEQRSFEKVIGWNLHPEMLPNLQEVADEAGLPFEAVELDGMREADVIISITSSFDAILKADQVSPGTHVACMGTDTKGKQEVDPQLLVAADVFTDEVAQSVSIGEAQHAIAQGLIQKGDVAQIGAVINGINPGRTSDDQITLFDGTGVGLQDLAVAASVVDVAVEKGIAIEVDF

SEQ ID NO: 566 - protein, 274 aa, Ruegeria mobilis F1926
DALYGFKGGFDSAGLSLGLKAGGYWPNNLEKRGLINHQSTVFLFDPDTGKVRAMVGGNLLTALRTAAASSVSIKHLAREDAKVIGMIGAGHQAKFQLRAALEQRDFDKVIGWNLHPEMLPNLKEVATEAGLPFEAVELDGLKEADVIISITSSFDAILKADQVSPGTHIACMGTDTKGKQEVDPQLLVRATVFTDEVAQSISIGEAQHAVAQGLITEADVAQLGAVINGAHPGRSSAEQITLFDGTGVGLQDLAVAASVVELAVKKGVAIEVDF

SEQ ID NO: 567 - protein, 321 aa, Oceanicola sp. HL-35
MLIVPEREIADLMTREAAFEAVEKVFAAMAAGDAYNFPVVREAIGHEDALYGFKGGFDRAGLTLGLKAGGYWPNNLDKRSIINHQSTVFLFDPDTGKARAMVGGNLLTALRTAAASSVSIRHLARKDAKVIGMIGAGHQAKFQLRAALEQRGFEKVIGWNLHPEMLPNLEEVASEAGLPFEAVELDGMTEADVIITITSSFGAILSAGQVSPGTHVACMGTDTTGKQEVEPALLGHATVFTDEVAQSVSIGEAQHAVSQGLIAESDIAQLGAVINGSHPGRISDHQITLFDGTGVGLQDLAVAAAVVDLAVEKGIAIEVDF

SEQ ID NO: 568 - protein, 333 aa, Psychrobacter sp. G
MSEANSVNSDEGLLIVSEDACKSVIDRPSAFIAVENVFASMSRGDAYNFPVIREAIGYADALYGFKSGFDRAGKSLGLKSGGYWPGNAAKGLTNHQSTIFLFNPDNGKLRALVGGNYLTAVRTAAASAVSIAHLARKDSKVLGMVGAGHQSTFQLRAALEQRNFEKVVAWNKNKDRLKNLQAVAEELGVPFEAVEREQLCSEADVIITITSAFEPLLMKEWIKPGTHIACMGTDTVGKQEVDVNLVAAATVFTDEIAQSISLGEAQHAIKSGAIKESDITTLGDVINGDHPGRSSDDEITLFDGTGVGLQDLAVASAAAKLALEKGEAQHISL

SEQ ID NO: 569 - protein, 321 aa, Ensifer meliloti Rm41
MIIVPENQIAGLITPADCLVAVEGVFASMAKRSAYNFPVIREAIGHADALYGFKSGFDRDSLALGLKSGGFWPNNVQKGLANHQSTVFLFDADTGRCRAMVGGNLLTALRTAAASAVSIKYLARKDAKVLGMIGAGHQSTYQLRAAVEQRPFEKVLAWNLHPEMLSRLEGVARELELPFETVDLDRLGDESDVIISITSSFAPILKASQVRPGTHLACMGTDTKGKQEMDAELIAAATVFADEVAQAITIGECQHAIEKGLISRDDIVEIGAVITGRHPGRSSPEEITLFDGTGVGLQDLAVASAAVELALSNGTAIEVDF

SEQ ID NO: 570 - protein, 334 aa, Roseovarius sp. MCTG156(2b)
MMNTHVETTADGFVIVGEEICQKIISRADAFGAVEAVFAAMARGDAYNFPVVREAIGHADALYGFKGGFDRSGLSLGLKAGGYWPGNMDKGLTNHQSTVFLFDPDTGRLSALVGGNYLTALRTAASSSVSIAHLAREDSKVLGMVGAGHQSAFQLRAAVEQRSFEKVVAWNPHPDMLPRLGAVAEELGLEFEAVTQEELGAQADVIITITSAFEPLMMADWVKPGTHIACMGTDTKGKQEVDPALFTRATVFADEIAQSVSIGEAQHAVAQGLISEGDITPIGAVINGTHAGRASAEEVTLFDGTGVGLQDLAVASVAAKLARDQGLVTPITLG

SEQ ID NO: 571 - protein, 321 aa, Rhizobium rhizogenes OK036
MIIVPETEIAGLVTAADCFKAVEGVFASMANKSAYNFPVVREAIGHADALYGFKSGFDRKGLALGLKAGGFWPNNVHRGLTNHQSTVFLFDPDTGKCRAVVGGNLLTALRTAAASAISIKYLARKDAKVLGMIGAGHQATFQLRAALAQRQFEKIVGWNLHPDMLSRLEEVAKEEGLPFEAVDLDRLGAEADVIISITSSFAPMLKASQVRAGTHLACMGTDTKGKQEIEAEILVKATVFTDEVAQAVTIGESQHAIERGLIREEAIVEIGAVINGTHPGRISADQITLFDGTGVGLQDLAVASAAVELALAKGVAIEVDF

SEQ ID NO: 572 - protein, 321 aa, Rhizobium leguminosarum YR374; identical to SEQ ID NO: 465

SEQ ID NO: 573 - protein, 321 aa, Methylobacterium sp. YR668; identical to SEQ ID NO: 479

SEQ ID NO: 574 - protein, 321 aa, Sinorhizobium americanum CCGM7
MIIVPENQIAGLITPADCLVAVERVFASMAEKSAYNFPVIREAIGHADALYGFKSGFDRDSLALGLKSGGFWPHNVEKGLANHQSTVFLFDADTGRCRAMVGGNLLTALRTAAASAVSIKYLARKDAKVLGMIGAGHQSTYQLRAAVEQRPIEKVLAWNLHPEMLSRLEEVARELELPFETVDLDRLGAEADVIISITSSFAPILKASQIRPGTHLACMGTDTKGKQEVDPELVAAATVFTDEVAQAVTIGECQHAIDKGLISKDDIVEIGAVITGRHKGRSSSEEITLFDGTGVGLQDLAVASAAVELALSKGAAIEVDF

SEQ ID NO: 575 - protein, 321 aa, Palleronia marisminoris DSM 26347
MLIVPEREIANLMTREAAFDAVEKVFAAMASDDARNFPVVREAIGHEDALYGFKGGFDRAGLTLGLKAGGYWPHNLEKHELINHQSTVFLFDPDTGRAKAMVGGNLLTALRTAAASSVSIKHLAREDAKVIGMIGAGHQATFQLRAALEQRRFEKVIGWNYHPEMLPNIEKVATEAGLPFEAVDLPGMAEADVIITITSAFAPSLMADHVSPGTHIACMGTDTKGKQEVETALLGRATVFTDEVAQSISIGEAQHAIQDLSLRPEDIIQLGRVINGSHEGRTSDDEITLFDGTGVGLQDLAVAAAVVDLAVEKGISIEVDF

SEQ ID NO: 576 - protein, 320 aa, Paracoccus aminovorans DSM 8537
MFVVAEKEIAGLMTPEAAFEAIEAIFASMARRKAYNFPVVREAIGHEDALYGFKGGFDASALTLGLKAGGYWPNNQKHNLINHQSTVFLFDPDTGRVSAAIGGNLLTALRTAAASAVSIKYLAPQGAKVLGMIGAGHQSAFQMRAAAAVHQFEKVIGWNPHPEMLGRLAETAADLGLPFEAVELDRLGAEADVIISITSSFSPLLMNEHVKGPTHIAAMGTDTKGKQELDPALVARARVFTDEVAQSVSIGECQHAIAAGLIAEDQIGELGAVVAGDDPGRGDAEVTIFDGTGVGLQDLAVAAKVLEIAKEKGVAQTVEI

SEQ ID NO: 577 - protein, 321 aa, Yangia pacifica CGMCC 1.3455; identical to SEQ ID NO: 515

SEQ ID NO: 578 - protein, 321 aa, Roseovarius indicus DSM 26383
MIIVPEREIADLMTREAAFEAVERVFAAMAAGEAYNFPVVREAIGHEDALYGFKGGFDRSGLTLGLKAGGYWPHNLAKRGVINHQSTVVLFDADTGRVHAMVGGNLLTALRTAAASAVSIRYLAREDARVLGMIGAGHQAAFQLRAALEQRRFEKVIGWNLNPEMLPNLEKVAEEAGVPFEAVELGGMREADVIISITSSFEAILGADQVSPGTHVACMGTDTKGKQEVAPGLLARAVVFTDEVAQSVSIGEAQHAVAMGLIGEGDVQQLGAVINGAHPGRRSAEEITLFDGTGVGLQDLAVASRVVELAQEAGRAVMVDF

SEQ ID NO: 579 - protein, 321 aa, Jannaschia rubra DSM 16279; identical to SEQ ID NO: 368

SEQ ID NO: 580 - protein, 321 aa, Rhizobium etli bv. phaseoli IE4803
MIIVPERAIADLIGSAECFTAVEQVFAAMARKSAYNFPVVRESIGYADALYGFKSGFDRESLSLGLKSGGFWPKNVEKGLTNHQSTVFLFDADTGRCRAVVGGNLLTALRTAAASAISIKYLAREDAKTLGIIGAGHQSTFQLRAAVEQRNFEKVVAWNYHPEMLNRLAEVAREIGLPFEAVDLDRLGAEADVIISITSSFSPSLMAAQVRPGTHLACMGTDTKGKQEVDAKLVAASSIFTDEVAQAITIGECQHAIADGLIGEADILEIGAVITGDVKGRRSADDITLFDGTGVGLQDLAVAAAVVDLAVREGVAIEVDF

SEQ ID NO: 581 - protein, 321 aa, Roseivivax sediminis DSM 26472
MLIVPEREIADLMTREAAFAAVEKVFAAMASGDAYNFPVVREAIGHEDALYGFKGGFDRAGLTLGLKAGGYWPNNLDKRGIINHQSTVFLFDPDTGKAKAMVGGNLLTALRTAAASSVSIRHLARKDAKVIGMIGAGHQAKFQLRAALEQRDFDKVIGWNLHPDMLPNLEEVAAEAGLPFEAVELDGMQEADVMISITSSFDAILSAGQVAPGTHIACMGTDTKGKQEVDPQLLAKATVFTDEVAQSVSIGEAQHAVAQGLIAEGDIAQLGAVINGSHKGRASDEEITLFDGTGVGLQDLAVANAVVELAVEKGIAIEVDF

SEQ ID NO: 582 - protein, 321 aa, Agrobacterium sp. KFB 330
MIIVPEHEIEGLVSASDCFTAVERVFASMAQKSAYNFSVIREAIGHADALYGFKSGFDRESLALGLKSGGFWPNNMEKGLTNHQSTIFLFDADTGKCRAVVGGNLLTALRTAAASAVSIKYLARPDAKVLGMVGAGHQSSFQLRAALQQRPFEKVIGWNLFPEALDRLAKVAAEHDVPFEAVDLDRLGAEADVIITITSSFAPILKAAQIRPGTHLACMGTDTKGKQEVEAELLAAATIFSDEIAQSVTIGEAQHPVAKGLISPNRIIEIGAVINGAHPGRSNADEITVFDGTGVGLQDLAVASKAVDLAVQKGVAVVVDF

SEQ ID NO: 583 - protein, 321 aa, Leisingera sp. ANG-DT; identical to SEQ ID NO: 549

SEQ ID NO: 584 - protein, 321 aa, Methylobacterium sp. ME121
MIIVPEHAIDGLLTEAECFGAVEQVFASMARRRAGNFPVVREAIGHADAIYGFKSGFDRDSLALGLKAGGFWPGNAAKGLTNHQSTVFLFDADTGRCRAVVGGNLLTALRTAAACAISIRHLAREGARVLGMIGAGHQSAFQLRAALAQRPFERVLAWNLHPGMFGRMEAVARERGVPFEVVDLDRLGAEADVVVTITSSFAPILKAAQVRPGTHVACMGTDTRGKQEVEAELLAAATVFTDEVAQSVSLGEAQHAVARGLLAADSIVEIGAVINGDHPGRVSDAEITVFDGTGVGLQDLAVAAVAVDRALAKGLATEVGF

SEQ ID NO: 585 - protein, 321 aa, Litoreibacter meonggei DSM 29466
MLIVPEREIADLMTREAAFDAVEGVFAAMASKDAYNFPVIREAIGHEDALYGFKGGFDKAGMTLGLKAGGYWPNNLEKHGHINHQSTIFLFDPDTGMVSAMVGGNLLTALRTAAASSVSIKHLARKDAKVMGMVGAGHQATFQLRAALEQRQFEKVIGWNYHPEMLPNIEKIANEAGLPFEAVELEGMREADVVISITSTFAPTIMADHIAPGTHIACMGTDTKGKQEVEAALLARATVFTDEVAQSVSIGEAQHAVAQGLIKESDVHQLGAVINGTDKGRASDDEITLFDGTGVGLQDLAVAASVVELAVQKGVAIDVDF

SEQ ID NO: 586 - protein, 321 aa, Litoreibacter halocynthiae DSM 29467
MLIVPEREIANLMTRDAAFDAVEGVFAAMASKDAYNFPVIREAIGHEDALYGFKGGFDKAGMTLGLKAGGYWPNNLEKHGHINHQSTIFLFDPDTGMVSAMVGGNLLTALRTAAASSVSIKHLARKDAKVMGMVGAGHQATFQLRAALEQRQFEKVIGWNYHPEMLPNIEKIANEAGLPFEAVELEGMREADVVISITSTFAPTIMADHIAPGTHIACMGTDTKGKQEVEAALLARATVFTDEVAQSISIGEAQHAVAEGLIKESDVHQLGAVINGTHKGRTSDDEITLFDGTGVGLQDLAVAASVVELAVQKGVAIEVDF

SEQ ID NO: 587 - protein, 329 aa, Roseivivax lentus DSM 29430
MSNEKDGSVVIVTEEICQKVVDRASAFTAVEQVFGAMAKGDAYNFPVIREAIGYADALYGFKSGFDRVGGSLGLKSGGYWPGNAEKGLTNHQSTVFLFDPDTGRLQALVGGNYLTAVRTAASSSVSIAHLARKDAKVLGMVGAGHQSAFQLRAAAEQRDFERVVAWNPHPDMLPKLGEVAKDLGLDFEAVSQEELGAQADVIITITSAFEPLLMADWIKPGTHIACMGTDTKGKQEVDAALLARATVFTDEIAQSISIGEAQHAVGQGLIAEGDITPIGAVINGDHKGRTSEDEITLFDGTGVGLQDLAVASVAAKLARERGMAQTVML

SEQ ID NO: 588 - protein, 321 aa, Rhodovulum sulfidophilum DSM 2351
MFIVPEKEIAGLVSADQCFEAVEAVFAAMARGDAYNFPVIREAIGHAEALYGFKSGFDRAGSVLGLKSGGYWPGNAAKGLTNHQSTVVLFDPDSGRPAALVGGNLLTALRTAAASAVSIRYLARSDARVLGVLGAGHQSAFQLRAAVAQRRFEKIVGWNYHPEMLPRLAETAAELGLPFEAVSLEDLGAQADVIVTISSSFSAQLMDAHVRPGTHLACMGTDTKGKQEIDPAIFARARVFADEIAQSVEIGEAQHAVAAGLIAAEDIVEIGAVINGTAPGRQSDDEITVFDGTGVGLQDLAVAARAVAAARARGLAVEVDL

SEQ ID NO: 589 - protein, 325 aa, Roseobacter denitrificans DSM 7001; identical to SEQ ID NO: 304

SEQ ID NO: 590 - protein, 321 aa, Leisingera sp. ANG-Vp
MYIVPEKEIAGLMTREAAFDAVEKVFASMASGDAYNFPVVREAIGHEDALYGFKGGFDRAGLTLGLKAGGYWPNNLEKRGLINHQSTVFLFDPDTGKAKAMVGGNLLTALRTAAASSVSIKHLARKDAKVIGMIGAGHQAKFQLRAALEQREFEKVIGWNLHPDMLPNLQEVADEAGLPFEAVELDGMREADVIISITSSFDAILNAGQVSPGTHIACMGTDTKGKQEVDPQLLVAADVFTDEVAQSITIGEAQHAVAQGLIQEADVAQIGAVINGTNPGRTSDDQITLFDGTGVGLQDLAVAASVVDLAVAQGIAIEVDF

SEQ ID NO: 591 - protein, 321 aa, Marivita hallyeonensis DSM 29431
MYIVPEAKIADLVSREASFEAVEQVFAAMASKDAYNFPVVREAIGHEDALYGFKGGFDRVGGSLGLKAGGYWPHNLEKRGLINHQSTVFLFDPDTGRVHAMVGGNLLTALRTAAASSVSIKHLAREDAKVMGMIGAGHQATFQLRAALEQRSFEKVIGWNYHPEMLPNIEKVAQEAGLPFEAVELEGMREADVIISITSAFSPSLMADHVSEGTHIACMGTDTKGKQEVEAALLAKAKVFTDEVAQSISIGEAQHAVGSGLIAESDVIEIGAVINGAHPGRTSDSDITLFDGTGVGLQDLAVASKVVELAIERGVAIEVDF

SEQ ID NO: 592 - protein, 321 aa, Labrenzia alba CECT 7551
MIIVPEKEIAGLIGRVEAFEAVENVFAAMSSGAAYNFPVIREAIGHADALYGFKSGFDRSSLALGLKSGGYWPGNADKGLTNHQSTVFLFDADTGQAKAVVGGNLLTALRTAAASAVSIKHLAREDAKVLGMIGAGHQSAFQMRSAVEQRKFEKVIGWNFHPEMLSRLEETATELGLPYESVDLDRMGTEADVIISITSSFDPILMADQVTQGTHIACMGTDTKGKQEVDTGLVARATLFTDEVAQSATIGECQHAVAAGIVSRDNINEIGAVINGTHSGRTSESEITLFDGTGVGLQDLAVASAAVELAVQKGVAIEVAF

SEQ ID NO: 593 - protein, 321 aa, Thalassobius abyssi DSM 100673
MWIVPEREIAGLVSREAAFDAVEQVFAAMAAGRANNFPVVREAIGHENALYGFKGGFDQLGGALGLKAGGYWPNNLEKRGLINHQSTVFLFDPDTGRPVAMVGGNLLTALRTAAASSVSIQHLSRPDARVIGMVGAGHQATFQLRAALEQRSFEKVIGWNRHPEMLPNIQKVAEDADLPFEAVELGDLSEADVIITITSSFGPILMVDHVAPGTHIACMGTDTKGKQEVEARLLANSLVFTDEVAQSISIGEAQHAVASGALASDAVIEIGRVINGDHPGRQSADEITLFDGTGVGLQDLAVAAKVVDLAIEKGVAIKVDI

SEQ ID NO: 594 - protein, 321 aa, Roseovarius indicus B108 cultivar; identical to SEQ ID NO: 578

SEQ ID NO: 595 - protein, 321 aa, Litoreibacter ponti DSM 100977
MYIVPESAIADLISAEASFDAVEAVFASMAKGDAYNFPVIREAIGHEEALYGFKGGFDGKGMALGLKAGGYWPHNLEKRGLINHQSTVFLFDPDTGRVASMVGGNLLTALRTAAASSVSIKHLARKDARVMGMIGAGHQAKFQLRSALQTHAFEKVISWNYHPEMLPGMAEVAAEFDLPFEEVQLEGMTEADVVISITSSFAPIFGPDHIAPGTHVACMGTDTIGKQECEAELLARATVFTDEVAQSISIGEAQHAVKAGLIMETEVNQIGDVINGVHKGRSSDDEITLFDGTGVGLQDLAVAQSVVEIAVERGVAIEVDF

SEQ ID NO: 596 - protein, 321 aa, Yangia sp. CCB-MM3
MLIVPEREIASLMTRDAAFAAVEKVFAAMAAGDAYNFPVVREAIGHEDALYGFKGGFDRSGLTLGLKAGGYWPNNLATRGIINHQSTVFLFDPDTGKAKAMVGGNLLTALRTAAASSVSIRHLAREDARVIGMVGAGHQATFQLRAALEQREFDKVIGWNLHPEMLPNLEKVAAEAGVPFEAVDLPGMREADVIISITSSFDAILMAEHVSPGCHIACMGTDTKGKQEVSPALLAKATVFTDEVAQSVSIGEAQHAVAQGLIDESAITQLGAVINGAHPGRASAEEITLFDGTGVGLQDLAVAAAVVDLAVEKGIAIEVDF

SEQ ID NO: 597 - protein, 321 aa, Granulosicoccus antarcticus IMCC3135
MFVVSEEVCRKVVSRADAFDAVQAVFAAMARGDARNFPVVREALGHADALYGFKSGFDRAGLALGVKSGGYWPGNAQKGLTNHQSTVFLFDPDTGQLQALVGGNYLTAIRTAAASAVSIAHLARKDARVLGMIGAGHQAQFQLRAAAEQRQFEKVIAWNLHPEKLSILEAVATELGLPFEAVGRQQLAEQADTIITITSAHEALLDSGWIRPGTHIACMGTDTAGKQELDPQLFSDASVFTDELAQSITIGEAQHAFKAGQLQEADITALGAVINGDHPGRVTDDEITVFDGTGVGLQDLAVAAVALRVACEEGDAKEIAL

SEQ ID NO: 598 - protein, 321 aa, Tateyamaria omphalii DOK1-4
MLIVPEKDIADLMTRDAAFDAVEQVFAAMASDDAYNFPVVREAIGHEDALYGFKGGFDRAGATLGLKAGGYWPHNLEKRDLINHQSTVFLFDPDTGKPAAMVGGNLLTALRTAAASSVSIKHLARPDAKVLGMIGAGHQATFQLRAALEQRAFDRVIGWNYHPDMLPNIAKVAEDAGLPFEAVDLPGMAEADVIISITSAFAPSLMADHVSPGTHIACMGTDTKGKQEVEAALLARATVFTDEVAQSISIGEAQHAIAAGLIAESDIHQIGAVINGAHPGRTSDTDITLFDGTGVGLQDLAVAARVVDLAQKKGIAIHVDF

SEQ ID NO: 599 - DNA, 1164 bp, Paracoccus denitrificans DSM 413
  CDS (1)..(1164): beta-hydroxyaspartate aldolase
atgaacgcgaaaacggatttctccggctacgaggtcggctatgacatccccgccctgcccggcatggacgagagcgagatccagacgccttgcctgatcctcgacctggacgcgctggagcgcaacatcaggaagatgggcgactacgccaaggcccacggcatgcgccaccgcagccacggcaagatgcacaagtcggtcgacgtgcagaagctgcaggagtcgctgggcggctcggtcggcgtctgctgccagaaggtcagcgaggccgaggcctttgcccgcggcggcatcaaggacgtgctggtcaccaacgaggtgcgcgagccggccaagatcgaccgcctggcccggctgcccaagaccggcgccacggtgacggtctgcgtcgacgacgtgcagaacatcgccgacctgtcggccgccgcgcagaagcacggcaccgagctgggcatcttcgtcgagatcgattgcggcgccggccgctgcggcgtgaccaccaaggaagccgtggtcgagatcgccaaggccgccgcggctgccccgaacctgaccttcaagggcatccaggcctatcagggcgcgatgcagcacatggacagcttcgaggaccgcaaggccaagctggacgccgccattgcccaggtgaaagaggccgtggacgcgctggaggccgagggcctggcccccgaattcgtctcgggcggcggcacgggttcctattatttcgaaagcaattctggtatttacaacgaattgcaatgcggctcctatgccttcatggatgccgattacggccgcatccacgatgccgagggcaagcgcatcgaccagggcgaatgggaaaacgcgctgttcatcctgacctcggtcatgtcgcatgccaagccgcacctggcggtggtcgatgccggcctcaaggcacagtcggtcgatagcggcctgcccttcgtctatggccgcgacgatgtgaaatacatcaagtgcagcgacgagcatggcgtggtcgaggacaaggacggcgtgctcaaggtcaacgacaagctgcggctggtgccgggccattgcgacccgacctgcaacgtccacgactggtatgtcggcgtgcggaacggcaaggtcgagacggtctggccggtctcggcgcgcggaaagggctactga

SEQ ID NO: 600 - protein, 387 aa, Paracoccus denitrificans DSM 413
MNAKTDFSGYEVGYDIPALPGMDESEIQTPCLILDLDALERNIRKMGDYAKAHGMRHRSHGKMHKSVDVQKLQESLGGSVGVCCQKVSEAEAFARGGIKDVLVTNEVREPAKIDRLARLPKTGATVTVCVDDVQNIADLSAAAQKHGTELGIFVEIDCGAGRCGVTTKEAVVEIAKAAAAAPNLTFKGIQAYQGAMQHMDSFEDRKAKLDAAIAQVKEAVDALEAEGLAPEFVSGGGTGSYYFESNSGIYNELQCGSYAFMDADYGRIHDAEGKRIDQGEWENALFILTSVMSHAKPHLAVVDAGLKAQSVDSGLPFVYGRDDVKYIKCSDEHGVVEDKDGVLKVNDKLRLVPGHCDPTCNVHDWYVGVRNGKVETVWPVSARGKGY

SEQ ID NO: 601 - DNA, 948 bp, Paracoccus denitrificans DSM 413
  CDS (1)..(948): beta-hydroxyaspartate dehydratase
atgtatatcccgacctatgaggacatgctggccgcgcatgagcggatcaagccgcatatccgccgcacgccgatccgcacctcggactatctgaacgagttgaccggcgcgcagctgttcttcaaatgcgagaacttccaggagccgggggccttcaaggtccgcggcgccaccaacgcggtcttcggcctcgacgatgcgcaggcggccaagggcgtcgcgacgcacagctcgggcaaccatgcctcgtgcctcagctacgccgccatgctgcgcggcattccctgcaacgtggtcatgccgcgcaccgcgccgcaggccaagaaggacacggtgcgccgctatggcggtgtcatcaccgaatgcgagccctcgaccagctcgcgcgaagagaccttcgccaaggtgcaggccgagaccggcggcgatttcgtccacccctataacgacccgcgcgtgatcgccggccagggcacctgcgccaaggaactggtcgagcaggtggacgggctcgacgcggtcgtggcccccatcggcggcggcggcatgatctcgggcacctgcctgacgctctcgacgctggcgcccgagaccagggtgatcgcggccgagcccgagcaggccgacgacgcctatcgcagcttcaaggccggctacatcatcgccgacgacgcgcccaagaccgtcgccgacgggctgctggtgccgctgaaggatctgacctggcatttcgtcaagaaccacgtcagcgagatctacaccgcctcggacgccgagatcgtggacgcgatgaagctgatctggaagcatctgcgcatcgtgatggagccctccagcgccgtgccgctggccaccatcctgaagaaccccgaagcctttgccggcaagcgcgtcggcgtcatcgtcaccggcggcaatgtcgatctcgacaagctgccgtggaactga

SEQ ID NO: 602 - protein, 315 aa, Paracoccus denitrificans DSM 413
MYIPTYEDMLAAHERIKPHIRRTPIRTSDYLNELTGAQLFFKCENFQEPGAFKVRGATNAVFGLDDAQAAKGVATHSSGNHASCLSYAAMLRGIPCNVVMPRTAPQAKKDTVRRYGGVITECEPSTSSREETFAKVQAETGGDFVHPYNDPRVIAGQGTCAKELVEQVDGLDAVVAPIGGGGMISGTCLTLSTLAPETRVIAAEPEQADDAYRSFKAGYIIADDAPKTVADGLLVPLKDLTWHFVKNHVSEIYTASDAEIVDAMKLIWKHLRIVMEPSSAVPLATILKNPEAFAGKRVGVIVTGGNVDLDKLPWN

SEQ ID NO: 603 - DNA, 31 bp, Artificial Sequence
  PCR Primer for imine reductase polypeptide encoding gene
gacgcctcatatgctcgtcgtcgccgaaaag

SEQ ID NO: 604 - DNA, 31 bp, Artificial Sequence
  PCR Primer for imine reductase polypeptide encoding gene
gccactcctcgagtcagatctcgacctcttg

SEQ ID NO: 605 - DNA, 31 bp, Artificial Sequence
  PCR primer for beta-hydroxyaspartate aldolase polypeptide encoding gene
gacgccgcatatgaacgcgaaaacggatttc

SEQ ID NO: 606 - DNA, 29 bp, Artificial Sequence
  PCR primer for beta-hydroxyaspartate aldolase polypeptide encoding gene
gacacctggatcctcagtagccctttccg

SEQ ID NO: 607 - DNA, 31 bp, Artificial Sequence
  PCR primer for beta-hydroxyaspartate dehydratase polypeptide encoding gene
gacgctgcatatgtatatcccgacctatgag

SEQ ID NO: 608 - DNA, 32 bp, Artificial Sequence
  PCR primer for beta-hydroxyaspartate dehydratase polypeptide encoding gene
gacactcggatcctcagttccacggcagcttg

SEQ ID NO: 609 - DNA, 5711 bp, Artificial Sequence
  pET-16b expression vector
ttctcatgtttgacagcttatcatcgataagctttaatgcggtagtttatcacagttaaattgctaacgcagtcaggcaccgtgtatgaaatctaacaatgcgctcatcgtcatcctcggcaccgtcaccctggatgctgtaggcataggcttggttatgccggtactgccgggcctcttgcgggatatccggatatagttcctcctttcagcaaaaaacccctcaagacccgtttagaggccccaaggggttatgctagttattgctcagcggtggcagcagccaactcagcttcctttcgggctttgttagcagccggatcctcgagcatatgacgaccttcgatatggccgctgctgtgatgatgatgatgatgatgatgatgatggcccatggtatatctccttcttaaagttaaacaaaattatttctagaggggaattgttatccgctcacaattcccctatagtgagtcgtattaatttcgcgggatcgagatctcgatcctctacgccggacgcatcgtggccggcatcaccggcgccacaggtgcggttgctggcgcctatatcgccgacatcaccgatggggaagatcgggctcgccacttcgggctcatgagcgcttgtttcggcgtgggtatggtggcaggccccgtggccgggggactgttgggcgccatctccttgcatgcaccattccttgcggcggcggtgctcaacggcctcaacctactactgggctgcttcctaatgcaggagtcgcataagggagagcgtcgagatcccggacaccatcgaatggcgcaaaacctttcgcggtatggcatgatagcgcccggaagagagtcaattcagggtggtgaatgtgaaaccagtaacgttatacgatgtcgcagagtatgccggtgtctcttatcagaccgtttcccgcgtggtgaaccaggccagccacgtttctgcgaaaacgcgggaaaaagtggaagcggcgatggcggagctgaattacattcccaaccgcgtggcacaacaactggcgggcaaacagtcgttgctgattggcgttgccacctccagtctggccctgcacgcgccgtcgcaaattgtcgcggcgattaaatctcgcgccgatcaactgggtgccagcgtggtggtgtcgatggtagaacgaagcggcgtcgaagcctgtaaagcggcggtgcacaatcttctcgcgcaacgcgtcagtgggctgatcattaactatccgctggatgaccaggatgccattgctgtggaagctgcctgcactaatgttccggcgttatttcttgatgtctctgaccagacacccatcaacagtattattttctcccatgaagacggtacgcgactgggcgtggagcatctggtcgcattgggtcaccagcaaatcgcgctgttagcgggcccattaagttctgtctcggcgcgtctgcgtctggctggctggcataaatatctcactcgcaatcaaattcagccgatagcggaacgggaaggcgactggagtgccatgtccggttttcaacaaaccatgcaaatgctgaatgagggcatcgttcccactgcgatgctggttgccaacgatcagatggcgctgggcgcaatgcgcgccattaccgagtccgggctgcgcgttggtgcggatatctcggtagtgggatacgacgataccgaagacagctcatgttatatcccgccgttaaccaccatcaaacaggattttcgcctgctggggcaaaccagcgtggaccgcttgctgcaactctctcagggccaggcggtgaagggcaatcagctgttgcccgtctcactggtgaaaagaaaaaccaccctggcgcccaatacgcaaaccgcctctccccgcgcgttggccgattcattaatgcagctggcacgacaggtttcccgactggaaagcgggcagtgagcgcaacgcaattaatgtaagttagctcactcattaggcaccgggatctcgaccgatgcccttgagagccttcaacccagtcagctccttccggtgggcgcggggcatgactatcgtcgccgcacttatgactgtcttctttatcatgcaactcgtaggacaggtgccggcagcgctctgggtcattttcggcgaggaccgctttcgctggagcgcgacgatgatcggcctgtcgcttgcggtattcggaatcttgcacgccctcgctcaagccttcgtcactggtcccgccaccaaacgtttcggcgagaagcaggccattatcgccggcatggcggccgacgcgctgggctacgtcttgctggcgttcgcgacgcgaggctggatggccttccccattatgattcttctcgcttccggcggcatcgggatgcccgcgttgcaggccatgctgtccaggcaggtagatgacgaccatcagggacagcttcaaggatcgctcgcggctcttaccagcctaacttcgatcactggaccgctgatcgtcacggcgatttatgccgcctcggcgagcacatggaacgggttggcatggattgtaggcgccgccctataccttgtctgcctccccgcgttgcgtcgcggtgcatggagccgggccacctcgacctgaatggaagccggcggcacctcgctaacggattcaccactccaagaattggagccaatcaattcttgcggagaactgtgaatgcgcaaaccaacccttggcagaacatatccatcgcgtccgccatctccagcagccgcacgcggcgcatctcgggcagcgttgggtcctggccacgggtgcgcatgatcgtgctcctgtcgttgaggacccggctaggctggcggggttgccttactggttagcagaatgaatcaccgatacgcgagcgaacgtgaagcgactgctgctgcaaaacgtctgcgacctgagcaacaacatgaatggtcttcggtttccgtgtttcgtaaagtctggaaacgcggaagtcagcgccctgcaccattatgttccggatctgcatcgcaggatgctgctggctaccctgtggaacacctacatctgtattaacgaagcgctggcattgaccctgagtgatttttctctggtcccgccgcatccataccgccagttgtttaccctcacaacgttccagtaaccgggcatgttcatcatcagtaacccgtatcgtgagcatcctctctcgtttcatcggtatcattacccccatgaacagaaatcccccttacacggaggcatcagtgaccaaacaggaaaaaaccgcccttaacatggcccgctttatcagaagccagacattaacgcttctggagaaactcaacgagctggacgcggatgaacaggcagacatctgtgaatcgcttcacgaccacgctgatgagctttaccgcagctgcctcgcgcgtttcggtgatgacggtgaaaacctctgacacatgcagctcccggagacggtcacagcttgtctgtaagcggatgccgggagcagacaagcccgtcagggcgcgtcagcgggtgttggcgggtgtcggggcgcagccatgacccagtcacgtagcgatagcggagtgtatactggcttaactatgcggcatcagagcagattgtactgagagtgcaccatatatgcggtgtgaaataccgcacagatgcgtaaggagaaaataccgcatcaggcgctcttccgcttcctcgctcactgactcgctgcgctcggtcgttcggctgcggcgagcggtatcagctcactcaaaggcggtaatacggttatccacagaatcaggggataacgcaggaaagaacatgtgagcaaaaggccagcaaaaggccaggaaccgtaaaaaggccgcgttgctggcgtttttccataggctccgcccccctgacgagcatcacaaaaatcgacgctcaagtcagaggtggcgaaacccgacaggactataaagataccaggcgtttccccctggaagctccctcgtgcgctctcctgttccgaccctgccgcttaccggatacctgtccgcctttctcccttcgggaagcgtggcgctttctcatagctcacgctgtaggtatctcagttcggtgtaggtcgttcgctccaagctgggctgtgtgcacgaaccccccgttcagcccgaccgctgcgccttatccggtaactatcgtcttgagtccaacccggtaagacacgacttatcgccactggcagcagccactggtaacaggattagcagagcgaggtatgtaggcggtgctacagagttcttgaagtggtggcctaactacggctacactagaaggacagtatttggtatctgcgctctgctgaagccagttaccttcggaaaaagagttggtagctcttgatccggcaaacaaaccaccgctggtagcggtggtttttttgtttgcaagcagcagattacgcgcagaaaaaaaggatctcaagaagatcctttgatcttttctacggggtctgacgctcagtggaacgaaaactcacgttaagggattttggtcatgagattatcaaaaaggatcttcacctagatccttttaaattaaaaatgaagttttaaatcaatctaaagtatatatgagtaaacttggtctgacagttaccaatgcttaatcagtgaggcacctatctcagcgatctgtctatttcgttcatccatagttgcctgactccccgtcgtgtagataactacgatacgggagggcttaccatctggccccagtgctgcaatgataccgcgagacccacgctcaccggctccagatttatcagcaataaaccagccagccggaagggccgagcgcagaagtggtcctgcaactttatccgcctccatccagtctattaattgttgccgggaagctagagtaagtagttcgccagttaatagtttgcgcaacgttgttgccattgctgcaggcatcgtggtgtcacgctcgtcgtttggtatggcttcattcagctccggttcccaacgatcaaggcgagttacatgatcccccatgttgtgcaaaaaagcggttagctccttcggtcctccgatcgttgtcagaagtaagttggccgcagtgttatcactcatggttatggcagcactgcataattctcttactgtcatgccatccgtaagatgcttttctgtgactggtgagtactcaaccaagtcattctgagaatagtgtatgcggcgaccgagttgctcttgcccggcgtcaacacgggataataccgcgccacatagcagaactttaaaagtgctcatcattggaaaacgttcttcggggcgaaaactctcaaggatcttaccgctgttgagatccagttcgatgtaacccactcgtgcacccaactgatcttcagcatcttttactttcaccagcgtttctgggtgagcaaaaacaggaaggcaaaatgccgcaaaaaagggaataagggcgacacggaaatgttgaatactcatactcttcctttttcaatattattgaagcatttatcagggttattgtctcatgagcggatacatatttgaatgtatttagaaaaataaacaaataggggttccgcgcacatttccccgaaaagtgccacctgacgtctaagaaaccattattatcatgacattaacctataaaaataggcgtatcacgaggccctttcgtcttcaagaa

SEQ ID NO: 610 - protein, 251 aa, Artificial Sequence
  Conserved amino acid sequence of the iminosuccinate reductases of SEQ ID NO: 300 - 598
  misc_feature (2)..(2): Xaa can be any naturally occurring amino acid
  misc_feature (4)..(4): Xaa can be any naturally occurring amino acid
  misc_feature (6)..(13): Xaa can be any naturally occurring amino acid
  misc_feature (15)..(15): Xaa can be any naturally occurring amino acid
  misc_feature (17)..(17): Xaa can be any naturally occurring amino acid
  misc_feature (20)..(21): Xaa can be any naturally occurring amino acid
  misc_feature (23)..(23): Xaa can be any naturally occurring amino acid
  misc_feature (25)..(31): Xaa can be any naturally occurring amino acid
  misc_feature (36)..(38): Xaa can be any naturally occurring amino acid
  misc_feature (41)..(44): Xaa can be any naturally occurring amino acid
  misc_feature (46)..(53): Xaa can be any naturally occurring amino acid
  misc_feature (55)..(56): Xaa can be any naturally occurring amino acid
  misc_feature (59)..(59): Xaa can be any naturally occurring amino acid
  misc_feature (64)..(67): Xaa can be any naturally occurring amino acid
  misc_feature (69)..(71): Xaa can be any naturally occurring amino acid
  misc_feature (73)..(80): Xaa can be any naturally occurring amino acid
  misc_feature (82)..(83): Xaa can be any naturally occurring amino acid
  misc_feature (87)..(87): Xaa can be any naturally occurring amino acid
  misc_feature (89)..(91): Xaa can be any naturally occurring amino acid
  misc_feature (93)..(107): Xaa can be any naturally occurring amino acid
  misc_feature (110)..(148): Xaa can be any naturally occurring amino acid
  misc_feature (150)..(164): Xaa can be any naturally occurring amino acid
  misc_feature (166)..(168): Xaa can be any naturally occurring amino acid
  misc_feature (174)..(175): Xaa can be any naturally occurring amino acid
  misc_feature (177)..(177): Xaa can be any naturally occurring amino acid
  misc_feature (179)..(191): Xaa can be any naturally occurring amino acid
  misc_feature (193)..(195): Xaa can be any naturally occurring amino acid
  misc_feature (197)..(200): Xaa can be any naturally occurring amino acid
  misc_feature (203)..(203): Xaa can be any naturally occurring amino acid
  misc_feature (205)..(220): Xaa can be any naturally occurring amino acid
  misc_feature (222)..(230): Xaa can be any naturally occurring amino acid
  misc_feature (232)..(237): Xaa can be any naturally occurring amino acid
  misc_feature (239)..(240): Xaa can be any naturally occurring amino acid
  misc_feature (243)..(243): Xaa can be any naturally occurring amino acid
  misc_feature (245)..(247): Xaa can be any naturally occurring amino acid
  misc_feature (250)..(250): Xaa can be any naturally occurring amino acid
GXKXGXXXXXXXXGXKXGGXXPXNXXXXXXXNHQSXXXLFXXXXGXXXXXXXXNXXTAXRTAAXXXXSXXXLXXXXXXXXGXXGAGXQXXXQXXXXXXXXXXXXXXXWNXXXXXXXXXXXXXXXXXXXXXXXXXXXXXXXXXXXXXXXSXXXXXXXXXXXXXXXHXXXMGTDTXXKXEXXXXXXXXXXXXXDXXXQXXXXGEXQXXXXXXXXXXXXXXXXGXXXXXXXXXRXXXXXXTXXDGXGXXXQDXA

SEQ ID NO: 611 - protein, 251 aa, Artificial Sequence; identical to SEQ ID NO: 610
  Conserved amino acid sequence of the iminosuccinate reductases of SEQ ID NO: 300 - 598
  misc_feature (2)..(2): Xaa can be any naturally occurring amino acid
  misc_feature (4)..(4): Xaa can be any naturally occurring amino acid
  misc_feature (6)..(13): Xaa can be any naturally occurring amino acid
  misc_feature (15)..(15): Xaa can be any naturally occurring amino acid
  misc_feature (17)..(17): Xaa can be any naturally occurring amino acid
  misc_feature (20)..(21): Xaa can be any naturally occurring amino acid
  misc_feature (23)..(23): Xaa can be any naturally occurring amino acid
  misc_feature (25)..(31): Xaa can be any naturally occurring amino acid
  misc_feature (36)..(38): Xaa can be any naturally occurring amino acid
  misc_feature (41)..(44): Xaa can be any naturally occurring amino acid
  misc_feature (46)..(53): Xaa can be any naturally occurring amino acid
  misc_feature (55)..(56): Xaa can be any naturally occurring amino acid
  misc_feature (59)..(59): Xaa can be any naturally occurring amino acid
  misc_feature (64)..(67): Xaa can be any naturally occurring amino acid
  misc_feature (69)..(71): Xaa can be any naturally occurring amino acid
  misc_feature (73)..(80): Xaa can be any naturally occurring amino acid
  misc_feature (82)..(83): Xaa can be any naturally occurring amino acid
  misc_feature (87)..(87): Xaa can be any naturally occurring amino acid
  misc_feature (89)..(91): Xaa can be any naturally occurring amino acid
  misc_feature (93)..(107): Xaa can be any naturally occurring amino acid
  misc_feature (110)..(148): Xaa can be any naturally occurring amino acid
  misc_feature (150)..(164): Xaa can be any naturally occurring amino acid
  misc_feature (166)..(168): Xaa can be any naturally occurring amino acid
  misc_feature (174)..(175): Xaa can be any naturally occurring amino acid
  misc_feature (177)..(177): Xaa can be any naturally occurring amino acid
  misc_feature (179)..(191): Xaa can be any naturally occurring amino acid
  misc_feature (193)..(195): Xaa can be any naturally occurring amino acid
  misc_feature (197)..(200): Xaa can be any naturally occurring amino acid
  misc_feature (203)..(203): Xaa can be any naturally occurring amino acid
  misc_feature (205)..(220): Xaa can be any naturally occurring amino acid
  misc_feature (222)..(230): Xaa can be any naturally occurring amino acid
  misc_feature (232)..(237): Xaa can be any naturally occurring amino acid
  misc_feature (239)..(240): Xaa can be any naturally occurring amino acid
  misc_feature (243)..(243): Xaa can be any naturally occurring amino acid
  misc_feature (245)..(247): Xaa can be any naturally occurring amino acid
  misc_feature (250)..(250): Xaa can be any naturally occurring amino acid

SEQ ID NO: 612 - protein, 282 aa, Artificial Sequence
  Conserved amino acid sequence of the iminosuccinate reductases of SEQ ID NO: 300, 306, 321, 324, 325, 338, 346, 357, 374, 422, 434 and 459
  misc_feature (2)..(5): Xaa can be any naturally occurring amino acid
  misc_feature (7)..(7): Xaa can be any naturally occurring amino acid
  misc_feature (12)..(12): Xaa can be any naturally occurring amino acid
  misc_feature (15)..(15): Xaa can be any naturally occurring amino acid
  misc_feature (18)..(20): Xaa can be any naturally occurring amino acid
  misc_feature (27)..(27): Xaa can be any naturally occurring amino acid
  misc_feature (31)..(35): Xaa can be any naturally occurring amino acid
  misc_feature (38)..(38): Xaa can be any naturally occurring amino acid
  misc_feature (40)..(40): Xaa can be any naturally occurring amino acid
  misc_feature (43)..(43): Xaa can be any naturally occurring amino acid
  misc_feature (46)..(46): Xaa can be any naturally occurring amino acid
  misc_feature (48)..(53): Xaa can be any naturally occurring amino acid
  misc_feature (58)..(60): Xaa can be any naturally occurring amino acid
  misc_feature (63)..(66): Xaa can be any naturally occurring amino acid
  misc_feature (68)..(72): Xaa can be any naturally occurring amino acid
  misc_feature (77)..(77): Xaa can be any naturally occurring amino acid
  misc_feature (81)..(81): Xaa can be any naturally occurring amino acid
  misc_feature (86)..(89): Xaa can be any naturally occurring amino acid
  misc_feature (92)..(93): Xaa can be any naturally occurring amino acid
  misc_feature (96)..(102): Xaa can be any naturally occurring amino acid
  misc_feature (104)..(105): Xaa can be any naturally occurring amino acid
  misc_feature (109)..(109): Xaa can be any naturally occurring amino acid
  misc_feature (111)..(112): Xaa can be any naturally occurring amino acid
  misc_feature (115)..(116): Xaa can be any naturally occurring amino acid
  misc_feature (119)..(124): Xaa can be any naturally occurring amino acid
  misc_feature (126)..(129): Xaa can be any naturally occurring amino acid
  misc_feature (132)..(149): Xaa can be any naturally occurring amino acid
  misc_feature (152)..(153): Xaa can be any naturally occurring amino acid
  misc_feature (155)..(163): Xaa can be any naturally occurring amino acid
  misc_feature (166)..(168): Xaa can be any naturally occurring amino acid
  misc_feature (172)..(185): Xaa can be any naturally occurring amino acid
  misc_feature (188)..(188): Xaa can be any naturally occurring amino acid
  misc_feature (190)..(190): Xaa can be any naturally occurring amino acid
  misc_feature (196)..(196): Xaa can be any naturally occurring amino acid
  misc_feature (201)..(208): Xaa can be any naturally occurring amino acid
  misc_feature (210)..(211): Xaa can be any naturally occurring amino acid
  misc_feature (215)..(217): Xaa can be any naturally occurring amino acid
  misc_feature (219)..(222): Xaa can be any naturally occurring amino acid
  misc_feature (225)..(225): Xaa can be any naturally occurring amino acid
  misc_feature (229)..(242): Xaa can be any naturally occurring amino acid
  misc_feature (244)..(244): Xaa can be any naturally occurring amino acid
  misc_feature (246)..(252): Xaa can be any naturally occurring amino acid
  misc_feature (254)..(259): Xaa can be any naturally occurring amino acid
  misc_feature (261)..(262): Xaa can be any naturally occurring amino acid
  misc_feature (265)..(265): Xaa can be any naturally occurring amino acid
  misc_feature (268)..(268): Xaa can be any naturally occurring amino acid
  misc_feature (276)..(281): Xaa can be any naturally occurring amino acid
MXXXXAXNFPVXREXIGXXXALYGFKXGFDXXXXXLGXKXGGXWPXNXXXXXXNHQSXXXLFXXXXGXXXXXVGGNXLTAXRTAAXXXXSIXXLAXXXXXXXGXXGAGXQXXFQXXAAXXXXXXEXXXXWNXXXXXXXXXXXXXXXXXXPFXXVXXXXXXXXXDVXXXITSXXXXXXXXXXXXXXTHXAXMGTDTXGKQEXXXXXXXXAXXFTDXXXQXXXXGEXQHAXXXXXXXXXXXXXXGXVXXXXXXXRXXXXXXTXXDGXGVXLQDLAVAXXXXXXA

SEQ ID NO: 613 - protein, 305 aa, Artificial Sequence
  Conserved amino acid sequence of the iminosuccinate reductases
  misc_feature (2)..(13): Xaa can be any naturally occurring amino acid
  misc_feature (15)..(15): Xaa can be any naturally occurring amino acid
  misc_feature (17)..(17): Xaa can be any naturally occurring amino acid
  misc_feature (19)..(19): Xaa can be any naturally occurring amino acid
  misc_feature (22)..(23): Xaa can be any naturally occurring amino acid
  misc_feature (26)..(28): Xaa can be any naturally occurring amino acid
  misc_feature (30)..(30): Xaa can be any naturally occurring amino acid
  misc_feature (38)..(38): Xaa can be any naturally occurring amino acid
  misc_feature (42)..(43): Xaa can be any naturally occurring amino acid
  misc_feature (50)..(50): Xaa can be any naturally occurring amino acid
  misc_feature (54)..(58): Xaa can be any naturally occurring amino acid
  misc_feature (61)..(61): Xaa can be any naturally occurring amino acid
  misc_feature (63)..(63): Xaa can be any naturally occurring amino acid
  misc_feature (66)..(66): Xaa can be any naturally occurring amino acid
  misc_feature (69)..(69): Xaa can be any naturally occurring amino acid
  misc_feature (71)..(76): Xaa can be any naturally occurring amino acid
  misc_feature (83)..(83): Xaa can be any naturally occurring amino acid
  misc_feature (87)..(89): Xaa can be any naturally occurring amino acid
  misc_feature (91)..(93): Xaa can be any naturally occurring amino acid
  misc_feature (95)..(95): Xaa can be any naturally occurring amino acid
  misc_feature (100)..(100): Xaa can be any naturally occurring amino acid
  misc_feature (104)..(104): Xaa can be any naturally occurring amino acid
  misc_feature (109)..(109): Xaa can be any naturally occurring amino acid
  misc_feature (115)..(116): Xaa can be any naturally occurring amino acid
  misc_feature (119)..(121): Xaa can be any naturally occurring amino acid
  misc_feature (124)..(124): Xaa can be any naturally occurring amino acid
  misc_feature (127)..(128): Xaa can be any naturally occurring amino acid
  misc_feature (132)..(132): Xaa can be any naturally occurring amino acid
  misc_feature (134)..(135): Xaa can be any naturally occurring amino acid
  misc_feature (138)..(139): Xaa can be any naturally occurring amino acid
  misc_feature (142)..(147): Xaa can be any naturally occurring amino acid
  misc_feature (149)..(149): Xaa can be any naturally occurring amino acid
  misc_feature (151)..(152): Xaa can be any naturally occurring amino acid
  misc_feature (155)..(156): Xaa can be any naturally occurring amino acid
  misc_feature (158)..(159): Xaa can be any naturally occurring amino acid
  misc_feature (161)..(162): Xaa can be any naturally occurring amino acid
  misc_feature (164)..(172): Xaa can be any naturally occurring amino acid
  misc_feature (176)..(176): Xaa can be any naturally occurring amino acid
  misc_feature (178)..(181): Xaa can be any naturally occurring amino acid
  misc_feature (183)..(186): Xaa can be any naturally occurring amino acid
  misc_feature (190)..(191): Xaa can be any naturally occurring amino acid
  misc_feature (195)..(199): Xaa can be any naturally occurring amino acid
  misc_feature (201)..(208): Xaa can be any naturally occurring amino acid
  misc_feature (211)..(211): Xaa can be any naturally occurring amino acid
  misc_feature (213)..(213): Xaa can be any naturally occurring amino acid
  misc_feature (219)..(219): Xaa can be any naturally occurring amino acid
  misc_feature (224)..(231): Xaa can be any naturally occurring amino acid
  misc_feature (233)..(234): Xaa can be any naturally occurring amino acid
  misc_feature (238)..(240): Xaa can be any naturally occurring amino acid
  misc_feature (242)..(244): Xaa can be any naturally occurring amino acid
  misc_feature (248)..(248): Xaa can be any naturally occurring amino acid
  misc_feature (252)..(265): Xaa can be any naturally occurring amino acid
  misc_feature (267)..(267): Xaa can be any naturally occurring amino acid
  misc_feature (269)..(275): Xaa can be any naturally occurring amino acid
  misc_feature (277)..(282): Xaa can be any naturally occurring amino acid
  misc_feature (284)..(285): Xaa can be any naturally occurring amino acid
  misc_feature (288)..(288): Xaa can be any naturally occurring amino acid
  misc_feature (299)..(304): Xaa can be any naturally occurring amino acid
EXXXXXXXXXXXXFXAXEXVFXXMAXXXAXNFPVVREXIGHXXALYGFKXGFDXXXXXLGXKXGGXWPXNXXXXXXNHQSTVXLFDXXXGXXXAXVGGNXLTAXRTAAXSAVSIXXLAXXXAKXLGXXGAGXQXXFQXXAAXXXXXXEXVXXWNXXPXXLXXLXXXXXXXXXPFEXVXXXXLXXXXDVIXXITSXXXXXLXXXXXXXXTHXAXMGTDTXGKQEXXXXXXXXAXXFTDXXXQXXXIGEXQHAXXXXXXXXXXXXXXGXVXXXXXXXRXXXXXXTXXDGXGVGLQDLAVAXXXXXXA

SEQ ID NO: 614 - protein, 282 aa, Artificial Sequence
  Conserved amino acid sequence of the iminosuccinate reductases
  misc_feature (3)..(5): Xaa can be any naturally occurring amino acid
  misc_feature (7)..(7): Xaa can be any naturally occurring amino acid
  misc_feature (12)..(12): Xaa can be any naturally occurring amino acid
  misc_feature (18)..(19): Xaa can be any naturally occurring amino acid
  misc_feature (27)..(27): Xaa can be any naturally occurring amino acid
  misc_feature (31)..(35): Xaa can be any naturally occurring amino acid
  misc_feature (38)..(38): Xaa can be any naturally occurring amino acid
  misc_feature (40)..(40): Xaa can be any naturally occurring amino acid
  misc_feature (43)..(43): Xaa can be any naturally occurring amino acid
  misc_feature (46)..(46): Xaa can be any naturally occurring amino acid
  misc_feature (48)..(51): Xaa can be any naturally occurring amino acid
  misc_feature (53)..(53): Xaa can be any naturally occurring amino acid
  misc_feature (58)..(60): Xaa can be any naturally occurring amino acid
  misc_feature (64)..(64): Xaa can be any naturally occurring amino acid
  misc_feature (66)..(66): Xaa can be any naturally occurring amino acid
  misc_feature (68)..(72): Xaa can be any naturally occurring amino acid
  misc_feature (77)..(77): Xaa can be any naturally occurring amino acid
  misc_feature (81)..(81): Xaa can be any naturally occurring amino acid
  misc_feature (86)..(89): Xaa can be any naturally occurring amino acid
  misc_feature (92)..(93): Xaa can be any naturally occurring amino acid
  misc_feature (96)..(98): Xaa can be any naturally occurring amino acid
  misc_feature (100)..(100): Xaa can be any naturally occurring amino acid
  misc_feature (102)..(102): Xaa can be any naturally occurring amino acid
  misc_feature (111)..(112): Xaa can be any naturally occurring amino acid
  misc_feature (115)..(115): Xaa can be any naturally occurring amino acid
  misc_feature (119)..(123): Xaa can be any naturally occurring amino acid
  misc_feature (126)..(129): Xaa can be any naturally occurring amino acid
  misc_feature (132)..(132): Xaa can be any naturally occurring amino acid
  misc_feature (135)..(145): Xaa can be any naturally occurring amino acid
  misc_feature (147)..(149): Xaa can be any naturally occurring amino acid
  misc_feature (152)..(153): Xaa can be any naturally occurring amino acid
  misc_feature (155)..(161): Xaa can be any naturally occurring amino acid
  misc_feature (163)..(163): Xaa can be any naturally occurring amino acid
  misc_feature (166)..(168): Xaa can be any naturally occurring amino acid
  misc_feature (172)..(172): Xaa can be any naturally occurring amino acid
  misc_feature (174)..(185): Xaa can be any naturally occurring amino acid
  misc_feature (188)..(188): Xaa can be any naturally occurring amino acid
  misc_feature (190)..(190): Xaa can be any naturally occurring amino acid
  misc_feature (196)..(196): Xaa can be any naturally occurring amino acid
  misc_feature (201)..(204): Xaa can be any naturally occurring amino acid
  misc_feature (206)..(208): Xaa can be any naturally occurring amino acid
  misc_feature (210)..(211): Xaa can be any naturally occurring amino acid
  misc_feature (216)..(216): Xaa can be any naturally occurring amino acid
  misc_feature (219)..(222): Xaa can be any naturally occurring amino acid
  misc_feature (225)..(225): Xaa can be any naturally occurring amino acid
  misc_feature (229)..(242): Xaa can be any naturally occurring amino acid
  misc_feature (244)..(244): Xaa can be any naturally occurring amino acid
  misc_feature (246)..(247): Xaa can be any naturally occurring amino acid
  misc_feature (249)..(251): Xaa can be any naturally occurring amino acid
  misc_feature (254)..(259): Xaa can be any naturally occurring amino acid
  misc_feature (261)..(261): Xaa can be any naturally occurring amino acid
  misc_feature (268)..(268): Xaa can be any naturally occurring amino acid
  misc_feature (276)..(278): Xaa can be any naturally occurring amino acid
  misc_feature (280)..(281): Xaa can be any naturally occurring amino acid
MAXXXAXNFPVXREAIGXXDALYGFKXGFDXXXXXLGXKXGGXWPXNXXXXLXNHQSXXXLFDXDXGXXXXXVGGNXLTAXRTAAXXXXSIXXLAXXXAXVXGMIGAGHQXXFQXRAAXXXXXFEXXXXWNXHPXXXXXXXXXXXEXXXPFXXVXXXXXXXEXDVXXXITSXFXXXXXXXXXXXXTHXAXMGTDTXGKQEXXXXLXXXAXXFTDEXAQXXXXGEXQHAXXXXXXXXXXXXXXGXVXXGXXXGRXXXXXXTXFDGTGVXLQDLAVAXXXVXXA

SEQ ID NO: 615 - protein, 282 aa, Artificial Sequence
  Conserved amino acid sequence of the iminosuccinate reductases
  misc_feature (2)..(5): Xaa can be any naturally occurring amino acid
  misc_feature (7)..(7): Xaa can be any naturally occurring amino acid
  misc_feature (12)..(12): Xaa can be any naturally occurring amino acid
  misc_feature (15)..(15): Xaa can be any naturally occurring amino acid
  misc_feature (18)..(20): Xaa can be any naturally occurring amino acid
  misc_feature (27)..(27): Xaa can be any naturally occurring amino acid
  misc_feature (31)..(35): Xaa can be any naturally occurring amino acid
  misc_feature (38)..(38): Xaa can be any naturally occurring amino acid
  misc_feature (40)..(40): Xaa can be any naturally occurring amino acid
  misc_feature (43)..(43): Xaa can be any naturally occurring amino acid
  misc_feature (46)..(46): Xaa can be any naturally occurring amino acid
  misc_feature (48)..(53): Xaa can be any naturally occurring amino acid
  misc_feature (58)..(59): Xaa can be any naturally occurring amino acid
  misc_feature (63)..(64): Xaa can be any naturally occurring amino acid
  misc_feature (66)..(66): Xaa can be any naturally occurring amino acid
  misc_feature (68)..(70): Xaa can be any naturally occurring amino acid
  misc_feature (72)..(72): Xaa can be any naturally occurring amino acid
  misc_feature (77)..(77): Xaa can be any naturally occurring amino acid
  misc_feature (81)..(81): Xaa can be any naturally occurring amino acid
  misc_feature (86)..(86): Xaa can be any naturally occurring amino acid
  misc_feature (88)..(89): Xaa can be any naturally occurring amino acid
  misc_feature (92)..(93): Xaa can be any naturally occurring amino acid
  misc_feature (96)..(99): Xaa can be any naturally occurring amino acid
  misc_feature (102)..(102): Xaa can be any naturally occurring amino acid
  misc_feature (105)..(105): Xaa can be any naturally occurring amino acid
  misc_feature (111)..(112): Xaa can be any naturally occurring amino acid
  misc_feature (115)..(116): Xaa can be any naturally occurring amino acid
  misc_feature (119)..(123): Xaa can be any naturally occurring amino acid
  misc_feature (127)..(129): Xaa can be any naturally occurring amino acid
  misc_feature (132)..(136): Xaa can be any naturally occurring amino acid
  misc_feature (138)..(139): Xaa can be any naturally occurring amino acid
  misc_feature (141)..(143): Xaa can be any naturally occurring amino acid
  misc_feature (145)..(149): Xaa can be any naturally occurring amino acid
  misc_feature (152)..(153): Xaa can be any naturally occurring amino acid
  misc_feature (155)..(163): Xaa can be any naturally occurring amino acid
  misc_feature (167)..(168): Xaa can be any naturally occurring amino acid
  misc_feature (172)..(172): Xaa can be any naturally occurring amino acid
  misc_feature (174)..(185): Xaa can be any naturally occurring amino acid
  misc_feature (188)..(188): Xaa can be any naturally occurring amino acid
  misc_feature (190)..(190): Xaa can be any naturally occurring amino acid
  misc_feature (196)..(196): Xaa can be any naturally occurring amino acid
  misc_feature (201)..(204): Xaa can be any naturally occurring amino acid
  misc_feature (206)..(208): Xaa can be any naturally occurring amino acid
  misc_feature (210)..(211): Xaa can be any naturally occurring amino acid
  misc_feature (216)..(217): Xaa can be any naturally occurring amino acid
  misc_feature (219)..(221): Xaa can be any naturally occurring amino acid
  misc_feature (225)..(225): Xaa can be any naturally occurring amino acid
  misc_feature (229)..(242): Xaa can be any naturally occurring amino acid
  misc_feature (244)..(244): Xaa can be any naturally occurring amino acid
  misc_feature (246)..(247): Xaa can be any naturally occurring amino acid
  misc_feature (249)..(251): Xaa can be any naturally occurring amino acid
  misc_feature (254)..(259): Xaa can be any naturally occurring amino acid
  misc_feature (261)..(262): Xaa can be any naturally occurring amino acid
  misc_feature (265)..(265): Xaa can be any naturally occurring amino acid
  misc_feature (268)..(268): Xaa can be any naturally occurring amino acid
  misc_feature (276)..(281): Xaa can be any naturally occurring amino acid
MXXXXAXNFPVXREXIGXXXALYGFKXGFDXXXXXLGXKXGGXWPXNXXXXXXNHQSXXFLFXXDXGXXXAXVGGNXLTAXRTAAXSXXSIXXLAXXXXKVXGMXGAGHQXXFQXXAAXXXXXFEKXXXWNXXXXXLXXLXXXAXXXXXPFXXVXXXXXXXXXDVIXXITSXFXXXXXXXXXXXXTHXAXMGTDTXGKQEXXXXLXXXAXXFTDEXXQXXXIGEXQHAXXXXXXXXXXXXXXGXVXXGXXXGRXXXXXXTXXDGXGVXLQDLAVAXXXXXXA

SEQ ID NO: 616 - protein, 282 aa, Artificial Sequence
  Conserved amino acid sequence of the iminosuccinate reductases
  misc_feature (2)..(5): Xaa can be any naturally occurring amino acid
  misc_feature (7)..(7): Xaa can be any naturally occurring amino acid
  misc_feature (12)..(12): Xaa can be any naturally occurring amino acid
  misc_feature (18)..(19): Xaa can be any naturally occurring amino acid
  misc_feature (27)..(27): Xaa can be any naturally occurring amino acid
  misc_feature (31)..(35): Xaa can be any naturally occurring amino acid
  misc_feature (38)..(38): Xaa can be any naturally occurring amino acid
  misc_feature (40)..(40): Xaa can be any naturally occurring amino acid
  misc_feature (43)..(43): Xaa can be any naturally occurring amino acid
  misc_feature (46)..(46): Xaa can be any naturally occurring amino acid
  misc_feature (48)..(53): Xaa can be any naturally occurring amino acid
  misc_feature (58)..(60): Xaa can be any naturally occurring amino acid
  misc_feature (63)..(64): Xaa can be any naturally occurring amino acid
  misc_feature (66)..(66): Xaa can be any naturally occurring amino acid
  misc_feature (68)..(72): Xaa can be any naturally occurring amino acid
  misc_feature (77)..(77): Xaa can be any naturally occurring amino acid
  misc_feature (81)..(81): Xaa can be any naturally occurring amino acid
  misc_feature (86)..(86): Xaa can be any naturally occurring amino acid
  misc_feature (88)..(89): Xaa can be any naturally occurring amino acid
  misc_feature (92)..(93): Xaa can be any naturally occurring amino acid
  misc_feature (96)..(99): Xaa can be any naturally occurring amino acid
  misc_feature (102)..(102): Xaa can be any naturally occurring amino acid
  misc_feature (105)..(105): Xaa can be any naturally occurring amino acid
  misc_feature (111)..(112): Xaa can be any naturally occurring amino acid
  misc_feature (115)..(115): Xaa can be any naturally occurring amino acid
  misc_feature (119)..(123): Xaa can be any naturally occurring amino acid
  misc_feature (127)..(129): Xaa can be any naturally occurring amino acid
  misc_feature (132)..(139): Xaa can be any naturally occurring amino acid
  misc_feature (141)..(145): Xaa can be any naturally occurring amino acid
  misc_feature (147)..(149): Xaa can be any naturally occurring amino acid
  misc_feature (152)..(153): Xaa can be any naturally occurring amino acid
  misc_feature (155)..(163): Xaa can be any naturally occurring amino acid
  misc_feature (167)..(168): Xaa can be any naturally occurring amino acid
  misc_feature (172)..(172): Xaa can be any naturally occurring amino acid
  misc_feature (174)..(185): Xaa can be any naturally occurring amino acid
  misc_feature (188)..(188): Xaa can be any naturally occurring amino acid
  misc_feature (190)..(190): Xaa can be any naturally occurring amino acid
  misc_feature (196)..(196): Xaa can be any naturally occurring amino acid
  misc_feature (201)..(204): Xaa can be any naturally occurring amino acid
  misc_feature (206)..(208): Xaa can be any naturally occurring amino acid
  misc_feature (210)..(211): Xaa can be any naturally occurring amino acid
  misc_feature (216)..(216): Xaa can be any naturally occurring amino acid
  misc_feature (219)..(221): Xaa can be any naturally occurring amino acid
  misc_feature (225)..(225): Xaa can be any naturally occurring amino acid
  misc_feature (229)..(242): Xaa can be any naturally occurring amino acid
  misc_feature (244)..(244): Xaa can be any naturally occurring amino acid
  misc_feature (246)..(247): Xaa can be any naturally occurring amino acid
  misc_feature (249)..(251): Xaa can be any naturally occurring amino acid
  misc_feature (254)..(259): Xaa can be any naturally occurring amino acid
  misc_feature (261)..(261): Xaa can be any naturally occurring amino acid
  misc_feature (268)..(268): Xaa can be any naturally occurring amino acid
  misc_feature (276)..(281): Xaa can be any naturally occurring amino acid
MXXXXAXNFPVXREAIGXXDALYGFKXGFDXXXXXLGXKXGGXWPXNXXXXXXNHQSXXXLFXXDXGXXXXXVGGNXLTAXRTAAXSXXSIXXLAXXXXKVXGMXGAGHQXXFQXRAAXXXXXFEKXXXWNXXXXXXXXLXXXXXEXXXPFXXVXXXXXXXXXDVIXXITSXFXXXXXXXXXXXXTHXAXMGTDTXGKQEXXXXLXXXAXXFTDEXAQXXXIGEXQHAXXXXXXXXXXXXXXGXVXXGXXXGRXXXXXXTXFDGTGVXLQDLAVAXXXXXXA

SEQ ID NO: 617 - protein, 315 aa, Artificial Sequence
  Conserved amino acid sequence of the iminosuccinate reductases of SEQ ID NO 303, 309, 310, 318, 344, 345, 347, 362, 385, 386, 396, 397, 414, 432, 434, 446, 459, 470, 472, 491, 503, 509, 513, 524, 539, 564, and 576
  misc_feature (2)..(3): Xaa can be any naturally occurring amino acid
  misc_feature (5)..(5): Xaa can be any naturally occurring amino acid
  misc_feature (7)..(8): Xaa can be any naturally occurring amino acid
  misc_feature (10)..(10): Xaa can be any naturally occurring amino acid
  misc_feature (14)..(14): Xaa can be any naturally occurring amino acid
  misc_feature (16)..(16): Xaa can be any naturally occurring amino acid
  misc_feature (20)..(20): Xaa can be any naturally occurring amino acid
  misc_feature (22)..(22): Xaa can be any naturally occurring amino acid
  misc_feature (24)..(25): Xaa can be any naturally occurring amino acid
  misc_feature (28)..(28): Xaa can be any naturally occurring amino acid
  misc_feature (30)..(33): Xaa can be any naturally occurring amino acid
  misc_feature (35)..(35): Xaa can be any naturally occurring amino acid
  misc_feature (44)..(44): Xaa can be any naturally occurring amino acid
  misc_feature (46)..(47): Xaa can be any naturally occurring amino acid
  misc_feature (59)..(63): Xaa can be any naturally occurring amino acid
  misc_feature (74)..(74): Xaa can be any naturally occurring amino acid
  misc_feature (76)..(80): Xaa can be any naturally occurring amino acid
  misc_feature (87)..(87): Xaa can be any naturally occurring amino acid
  misc_feature (92)..(92): Xaa can be any naturally occurring amino acid
  misc_feature (94)..(94): Xaa can be any naturally occurring amino acid
  misc_feature (97)..(98): Xaa can be any naturally occurring amino acid
  misc_feature (101)..(101): Xaa can be any naturally occurring amino acid
  misc_feature (119)..(119): Xaa can be any naturally occurring amino acid
  misc_feature (121)..(121): Xaa can be any naturally occurring amino acid
  misc_feature (125)..(125): Xaa can be any naturally occurring amino acid
  misc_feature (128)..(128): Xaa can be any naturally occurring amino acid
  misc_feature (140)..(140): Xaa can be any naturally occurring amino acid
  misc_feature (144)..(144): Xaa can be any naturally occurring amino acid
  misc_feature (146)..(151): Xaa can be any naturally occurring amino acid
  misc_feature (153)..(154): Xaa can be any naturally occurring amino acid
  misc_feature (156)..(156): Xaa can be any naturally occurring amino acid
  misc_feature (163)..(163): Xaa can be any naturally occurring amino acid
  misc_feature (166)..(166): Xaa can be any naturally occurring amino acid
  misc_feature (169)..(170): Xaa can be any naturally occurring amino acid
  misc_feature (173)..(174): Xaa can be any naturally occurring amino acid
  misc_feature (183)..(183): Xaa can be any naturally occurring amino acid
  misc_feature (185)..(186): Xaa can be any naturally occurring amino acid
  misc_feature (189)..(190): Xaa can be any naturally occurring amino acid
  misc_feature (195)..(196): Xaa can be any naturally occurring amino acid
  misc_feature (200)..(200): Xaa can be any naturally occurring amino acid
  misc_feature (202)..(203): Xaa can be any naturally occurring amino acid
  misc_feature (206)..(208): Xaa can be any naturally occurring amino acid
  misc_feature (211)..(211): Xaa can be any naturally occurring amino acid
  misc_feature (213)..(213): Xaa can be any naturally occurring amino acid
  misc_feature (216)..(216): Xaa can be any naturally occurring amino acid
  misc_feature (231)..(232): Xaa can be any naturally occurring amino acid
  misc_feature (235)..(235): Xaa can be any naturally occurring amino acid
  misc_feature (237)..(240): Xaa can be any naturally occurring amino acid
  misc_feature (244)..(244): Xaa can be any naturally occurring amino acid
  misc_feature (247)..(249): Xaa can be any naturally occurring amino acid
  misc_feature (253)..(253): Xaa can be any naturally occurring amino acid
  misc_feature (256)..(257): Xaa can be any naturally occurring amino acid
  misc_feature (259)..(270): Xaa can be any naturally occurring amino acid
  misc_feature (272)..(275): Xaa can be any naturally occurring amino acid
  misc_feature (277)..(279): Xaa can be any naturally occurring amino acid
  misc_feature (282)..(286): Xaa can be any naturally occurring amino acid
  misc_feature (288)..(288): Xaa can be any naturally occurring amino acid
  misc_feature (303)..(308): Xaa can be any naturally occurring amino acid
  misc_feature (310)..(312): Xaa can be any naturally occurring amino acid
  misc_feature (314)..(314): Xaa can be any naturally occurring amino acid
MXXVXEXXIXGLMXPXAAFXAXEXXFAXMXXXXAXNFPVVREAXGXXDALYGFKGGFDXXXXXLGLKAGGYWPXNXXXXXINHQSTXFLFDXDXGRXXAAXGGNLLTALRTAAASAVSXKXLAPXGAXVLGMIGAGHQSXFQMXAXXXXXXFXXVXGWNPHPXMLXRLXXTAXXLGLPFEAVXLXXLGXXADVIXXITSXFXXLLXXXHVXGXTHXAAMGTDTKGKQELDXXLVXRXXXXTDEXAQXXXIGEXQHXXAXXXXXXXXXXXXGXXXXGXXXGRXXXXXTXFDGTGVGLQDLAVAXXXXXXAXXXGXA

SEQ ID NO: 618 - protein, 319 aa, Artificial Sequence
  Conserved amino acid sequence of the iminosuccinate reductases of SEQ ID NO 303, 309, 344, 345, 347, 385, 386, 396, 414, 432, 434, 446, 459, 470, 472, 503, 513, 539, 564, and 576.
  misc_feature (2)..(2): Xaa can be any naturally occurring amino acid
  misc_feature (5)..(5): Xaa can be any naturally occurring amino acid
  misc_feature (8)..(8): Xaa can be any naturally occurring amino acid
  misc_feature (14)..(14): Xaa can be any naturally occurring amino acid
  misc_feature (16)..(16): Xaa can be any naturally occurring amino acid
  misc_feature (25)..(25): Xaa can be any naturally occurring amino acid
  misc_feature (28)..(28): Xaa can be any naturally occurring amino acid
  misc_feature (33)..(33): Xaa can be any naturally occurring amino acid
  misc_feature (35)..(35): Xaa can be any naturally occurring amino acid
  misc_feature (46)..(47): Xaa can be any naturally occurring amino acid
  misc_feature (59)..(61): Xaa can be any naturally occurring amino acid
  misc_feature (63)..(63): Xaa can be any naturally occurring amino acid
  misc_feature (74)..(74): Xaa can be any naturally occurring amino acid
  misc_feature (77)..(79): Xaa can be any naturally occurring amino acid
  misc_feature (94)..(94): Xaa can be any naturally occurring amino acid
  misc_feature (97)..(98): Xaa can be any naturally occurring amino acid
  misc_feature (101)..(101): Xaa can be any naturally occurring amino acid
  misc_feature (121)..(121): Xaa can be any naturally occurring amino acid
  misc_feature (125)..(125): Xaa can be any naturally occurring amino acid
  misc_feature (140)..(140): Xaa can be any naturally occurring amino acid
  misc_feature (146)..(146): Xaa can be any naturally occurring amino acid
  misc_feature (148)..(148): Xaa can be any naturally occurring amino acid
  misc_feature (151)..(151): Xaa can be any naturally occurring amino acid
  misc_feature (166)..(166): Xaa can be any naturally occurring amino acid
  misc_feature (169)..(170): Xaa can be any naturally occurring amino acid
  misc_feature (173)..(174): Xaa can be any naturally occurring amino acid
  misc_feature (183)..(183): Xaa can be any naturally occurring amino acid
  misc_feature (185)..(186): Xaa can be any naturally occurring amino acid
  misc_feature (189)..(189): Xaa can be any naturally occurring amino acid
  misc_feature (195)..(195): Xaa can be any naturally occurring amino acid
  misc_feature (200)..(200): Xaa can be any naturally occurring amino acid
  misc_feature (202)..(203): Xaa can be any naturally occurring amino acid
  misc_feature (206)..(208): Xaa can be any naturally occurring amino acid
  misc_feature (216)..(216): Xaa can be any naturally occurring amino acid
  misc_feature (231)..(232): Xaa can be any naturally occurring amino acid
  misc_feature (235)..(235): Xaa can be any naturally occurring amino acid
  misc_feature (239)..(240): Xaa can be any naturally occurring amino acid
  misc_feature (244)..(244): Xaa can be any naturally occurring amino acid
  misc_feature (248)..(249): Xaa can be any naturally occurring amino acid
  misc_feature (253)..(253): Xaa can be any naturally occurring amino acid
  misc_feature (257)..(257): Xaa can be any naturally occurring amino acid
  misc_feature (259)..(260): Xaa can be any naturally occurring amino acid
  misc_feature (263)..(268): Xaa can be any naturally occurring amino acid
  misc_feature (270)..(270): Xaa can be any naturally occurring amino acid
  misc_feature (275)..(275): Xaa can be any naturally occurring amino acid
  misc_feature (277)..(279): Xaa can be any naturally occurring amino acid
  misc_feature (282)..(283): Xaa can be any naturally occurring amino acid
  misc_feature (288)..(288): Xaa can be any naturally occurring amino acid
  misc_feature (303)..(306): Xaa can be any naturally occurring amino acid
  misc_feature (308)..(308): Xaa can be any naturally occurring amino acid
  misc_feature (311)..(312): Xaa can be any naturally occurring amino acid
  misc_feature (314)..(314): Xaa can be any naturally occurring amino acid
  misc_feature (316)..(317): Xaa can be any naturally occurring amino acid
MXVVXEKXIAGLMXPXAAFEAIEAXFAXMARRXAXNFPVVREAIGXXDALYGFKGGFDXXXLXLGLKAGGYWPXNQXXXLINHQSTVFLFDPDXGRXXAAXGGNLLTALRTAAASAVSIKXLAPXGAKVLGMIGAGHQSXFQMRAXAXVHXFEKVIGWNPHPEMLXRLXXTAXXLGLPFEAVXLXXLGXEADVIXSITSXFXXLLXXXHVKGPTHXAAMGTDTKGKQELDXXLVXRARXXTDEXAQSXXIGEXQHAXAXXLIXXXXXXEXGAVVXGXXXGRXXAEVTXFDGTGVGLQDLAVAXXXXEXAKXXGXAXXVE

SEQ ID NO: 619 - protein, 320 aa, Artificial Sequence
  Conserved amino acid sequence of the iminosuccinate reductases of SEQ ID NO 303, 344, 345, 347, 385, 386, 396, 414, 432, 434, 470, 472, 503, 539, and 576.
  misc_feature (2)..(2): Xaa can be any naturally occurring amino acid
  misc_feature (25)..(25): Xaa can be any naturally occurring amino acid
  misc_feature (60)..(60): Xaa can be any naturally occurring amino acid
  misc_feature (63)..(63): Xaa can be any naturally occurring amino acid
  misc_feature (74)..(74): Xaa can be any naturally occurring amino acid
  misc_feature (79)..(79): Xaa can be any naturally occurring amino acid
  misc_feature (97)..(98): Xaa can be any naturally occurring amino acid
  misc_feature (101)..(101): Xaa can be any naturally occurring amino acid
  misc_feature (121)..(121): Xaa can be any naturally occurring amino acid
  misc_feature (125)..(125): Xaa can be any naturally occurring amino acid
  misc_feature (146)..(146): Xaa can be any naturally occurring amino acid
  misc_feature (148)..(148): Xaa can be any naturally occurring amino acid
  misc_feature (151)..(151): Xaa can be any naturally occurring amino acid
  misc_feature (166)..(166): Xaa can be any naturally occurring amino acid
  misc_feature (170)..(170): Xaa can be any naturally occurring amino acid
  misc_feature (174)..(174): Xaa can be any naturally occurring amino acid
  misc_feature (183)..(183): Xaa can be any naturally occurring amino acid
  misc_feature (185)..(185): Xaa can be any naturally occurring amino acid
  misc_feature (189)..(189): Xaa can be any naturally occurring amino acid
  misc_feature (195)..(195): Xaa can be any naturally occurring amino acid
  misc_feature (206)..(208): Xaa can be any naturally occurring amino acid
  misc_feature (216)..(216): Xaa can be any naturally occurring amino acid
  misc_feature (239)..(239): Xaa can be any naturally occurring amino acid
  misc_feature (249)..(249): Xaa can be any naturally occurring amino acid
  misc_feature (259)..(260): Xaa can be any naturally occurring amino acid
  misc_feature (263)..(263): Xaa can be any naturally occurring amino acid
  misc_feature (265)..(267): Xaa can be any naturally occurring amino acid
  misc_feature (270)..(270): Xaa can be any naturally occurring amino acid
  misc_feature (275)..(275): Xaa can be any naturally occurring amino acid
  misc_feature (278)..(278): Xaa can be any naturally occurring amino acid
  misc_feature (282)..(283): Xaa can be any naturally occurring amino acid
  misc_feature (288)..(288): Xaa can be any naturally occurring amino acid
  misc_feature (303)..(304): Xaa can be any naturally occurring amino acid
  misc_feature (306)..(306): Xaa can be any naturally occurring amino acid
  misc_feature (308)..(308): Xaa can be any naturally occurring amino acid
  misc_feature (311)..(312): Xaa can be any naturally occurring amino acid
  misc_feature (314)..(314): Xaa can be any naturally occurring amino acid
  misc_feature (317)..(317): Xaa can be any naturally occurring amino acid
MXVVAEKEIAGLMTPEAAFEAIEAXFASMARRKAYNFPVVREAIGHEDALYGFKGGFDAXALXLGLKAGGYWPXNQKHXLINHQSTVFLFDPDTGRXXAAXGGNLLTALRTAAASAVSIKXLAPXGAKVLGMIGAGHQSAFQMRAXAXVHXFEKVIGWNPHPEMLXRLAXTAAXLGLPFEAVXLXRLGXEADVIXSITSSFSPLLXXXHVKGPTHXAAMGTDTKGKQELDPALVARARXFTDEVAQSVXIGECQHAIAXXLIXEXXXGEXGAVVXGDXPGRXXAEVTXFDGTGVGLQDLAVAXXVXEXAKXXGXAQXVEI

SEQ ID NO: 620 - protein, 320 aa, Artificial Sequence
  Conserved amino acid sequence of the iminosuccinate reductases of SEQ ID NO: 303, 344, 345, 385, 386, 396, 414, 432, 434, and 470
  misc_feature (60)..(60): Xaa can be any naturally occurring amino acid
  misc_feature (63)..(63): Xaa can be any naturally occurring amino acid
  misc_feature (74)..(74): Xaa can be any naturally occurring amino acid
  misc_feature (79)..(79): Xaa can be any naturally occurring amino acid
  misc_feature (121)..(121): Xaa can be any naturally occurring amino acid
  misc_feature (166)..(166): Xaa can be any naturally occurring amino acid
  misc_feature (183)..(183): Xaa can be any naturally occurring amino acid
  misc_feature (185)..(185): Xaa can be any naturally occurring amino acid
  misc_feature (189)..(189): Xaa can be any naturally occurring amino acid
  misc_feature (195)..(195): Xaa can be any naturally occurring amino acid
  misc_feature (206)..(208): Xaa can be any naturally occurring amino acid
  misc_feature (216)..(216): Xaa can be any naturally occurring amino acid
  misc_feature (239)..(239): Xaa can be any naturally occurring amino acid
  misc_feature (259)..(260): Xaa can be any naturally occurring amino acid
  misc_feature (263)..(263): Xaa can be any naturally occurring amino acid
  misc_feature (265)..(265): Xaa can be any naturally occurring amino acid
  misc_feature (267)..(267): Xaa can be any naturally occurring amino acid
  misc_feature (270)..(270): Xaa can be any naturally occurring amino acid
  misc_feature (278)..(278): Xaa can be any naturally occurring amino acid
  misc_feature (288)..(288): Xaa can be any naturally occurring amino acid
  misc_feature (303)..(304): Xaa can be any naturally occurring amino acid
  misc_feature (306)..(306): Xaa can be any naturally occurring amino acid
  misc_feature (308)..(308): Xaa can be any naturally occurring amino acid
  misc_feature (311)..(312): Xaa can be any naturally occurring amino acid
  misc_feature (314)..(314): Xaa can be any naturally occurring amino acid
MLVVAEKEIAGLMTPEAAFEAIEAVFASMARRKAYNFPVVREAIGHEDALYGFKGGFDAXALXLGLKAGGYWPXNQKHXLINHQSTVFLFDPDTGRVSAAVGGNLLTALRTAAASAVSIKXLAPKGAKVLGMIGAGHQSAFQMRAAANVHRFEKVIGWNPHPEMLXRLADTAAELGLPFEAVXLXRLGXEADVIXSITSSFSPLLXXXHVKGPTHXAAMGTDTKGKQELDPALVARARXFTDEVAQSVSIGECQHAIAXXLIXEXQXGEXGAVVAGDXPGRGDAEVTXFDGTGVGLQDLAVAXXVXEXAKXXGXAQEVEI

SEQ ID NO: 621 - protein, 320 aa, Artificial Sequence
  Conserved amino acid sequence of the iminosuccinate reductases of SEQ ID NO 303, 345, 396, 432, and 434
  misc_feature (63)..(63): Xaa can be any naturally occurring amino acid
  misc_feature (189)..(189): Xaa can be any naturally occurring amino acid
  misc_feature (195)..(195): Xaa can be any naturally occurring amino acid
  misc_feature (207)..(208): Xaa can be any naturally occurring amino acid
  misc_feature (216)..(216): Xaa can be any naturally occurring amino acid
  misc_feature (239)..(239): Xaa can be any naturally occurring amino acid
  misc_feature (259)..(259): Xaa can be any naturally occurring amino acid
  misc_feature (267)..(267): Xaa can be any naturally occurring amino acid
  misc_feature (270)..(270): Xaa can be any naturally occurring amino acid
  misc_feature (278)..(278): Xaa can be any naturally occurring amino acid
  misc_feature (303)..(303): Xaa can be any naturally occurring amino acid
MLVVAEKEIAGLMTPEAAFEAIEAVFASMARRKAYNFPVVREAIGHEDALYGFKGGFDASALXLGLKAGGYWPNNQKHNLINHQSTVFLFDPDTGRVSAAVGGNLLTALRTAAASAVSIKYLAPKGAKVLGMIGAGHQSAFQMRAAANVHRFEKVIGWNPHPEMLSRLADTAAELGLPFEAVELDRLGXEADVIXSITSSFSPLLMXXHVKGPTHXAAMGTDTKGKQELDPALVARARXFTDEVAQSVSIGECQHAIAXGLIREDQXGEXGAVVAGDXPGRGDAEVTIFDGTGVGLQDLAVAXAVVELAKHKGVAQEVEI
